(19) United States
(12) Patent Application Publication
(10) Pub. No.: US 2019/0031722 A1
(43) Pub. Date: Jan. 31, 2019

(54) INTERVENTIONS FOR FLAVIVIRUS INFECTIONS

(71) Applicant: IOGENETICS, LLC, Madison, WI (US)

(72) Inventors: Robert D. Bremel, Hillpoint, WI (US); Jane Homan, Hillpoint, WI (US); Michael Imboden, Madison, WI (US)

(21) Appl. No.: 16/072,357

(22) PCT Filed: Jan. 25, 2017
(86) PCT No.: PCT/US2017/014852

§ 371 Date: Jul. 24, 2018

Related U.S. Application Data
(60) Provisional application No. 62/290,616, filed on Feb. 3, 2016.
(60) Provisional application No. 62/286,779, filed on Jan. 25, 2016.
(60) Provisional application No. 62/292,964, filed on Feb. 9, 2016.
(60) Provisional application No. 62/306,264, filed on Mar. 10, 2016.
(60) Provisional application No. 62/321,375, filed on Apr. 12, 2016.
(60) Provisional application No. 62/350,881, filed on Jun. 16, 2016.
(60) Provisional application No. 62/372,110, filed on Aug. 8, 2016.
(60) Provisional application No. 62/405,484, filed on Oct. 7, 2016.

(51) Int. Cl. C07K 14/005; C07K 16/10; A61K 39/12

(52) U.S. Cl. CPC C07K 14/005; A61K 39/00; A61K 39/12; C07K 16/1081

(57) ABSTRACT

The present invention relates to vaccine compositions and therapeutic interventions for treating and preventing infections and diseases caused by flaviviruses, including Zika dengue, and Usutu virus. It also relates to compositions and methods for diagnosis and differential diagnosis of flaviviruses and co-endemic pathogens.

### FIELD OF THE INVENTION

[0001] The present invention relates to vaccine compositions and therapeutic interventions for treating and preventing infections and diseases caused by flaviviruses, including Zika, dengue, and Usutu virus. It also relates to compositions and methods for diagnosis and differential diagnosis of flaviviruses and co-endemic pathogens.

### BACKGROUND OF THE INVENTION

[0002] The flaviviruses comprise a large family of arthropod borne viruses which cause a diverse array of clinical diseases. Included in the flavivirus family are dengue, yellow fever, Zika virus, West Nile virus, St Louis encephalitis virus, Japanese encephalitis virus, Murray Valley virus, Usutu virus, and Tick borne encephalitis virus. A number of other flaviviruses are, and continue to be, recognized as emerging pathogens, so this list is not considered limiting. Clinical signs differ widely between flavivirus infections, from cardiovascular and hemorrhagic signs, to jaundice, neurologic and teratogenic manifestations. The molecular structure of the flavivirus family is highly conserved with minor sequence differences leading to the diverse clinical signs. Thus, while the present invention focuses on dengue, Zika virus, and Usutu virus, it will be apparent to those skilled in the art that the approaches used are not restricted to these viruses and that the examples and embodiments are likewise not limited to these viruses.

[0003] Zika virus (ZIKV) is a rapidly emerging epidemic arboviral disease which has infected over a million people in Brazil [1]. Zika virus has now spread throughout the Americas and to many other countries. While generally an inapparent or mild febrile disease, Zika virus infections have led to thousands of cases of microencephaly in children born to mothers pregnant at the time of infection. There is a growing awareness also of a high rate of Guillian Barré syndrome (GBS) and other neurologic complications following infection, as well as complications leading to thrombocytopenia. Co-endemnicity with dengue may contribute to the disease manifestations and also complicates differential diagnosis. In addition, epitope mimics in both viruses may result in a compounded clinical effect.

[0004] Dengue is a major and rapidly expanding public health challenge in tropical and subtropical areas, responsible for hundreds of millions of infections and approaching 100 million clinical cases worldwide each year [2]. Caused by 4 closely related serotypes of flavivirus, it is a second infection with a different serotype which leads to the most severe cases of dengue, dengue hemorrhagic fever. Severe dengue and dengue hemorrhagic fever (DHF) is characterized by spontaneous hemorrhage, increased vascular permeability, hematuria and thrombocytopenia. The severity of second infections has been attributed to the phenomenon of antibody dependent enhancement (ADE), in which prior non-neutralizing, or sub neutralizing, antibody facilitates uptake of virus and enhances virus titer [3]. The primary epitope to which ADE has been attributed is conserved across all dengue envelope proteins and is in the domain II of envelope protein, in the region known as the fusion loop [4]. While ADE undoubtedly contributes to the severity of dengue, it may not be the only factor. Recent studies of NS1, a non-structural protein which is shed into the extracellular space in large amounts in dengue, show that NS1 levels are a predictor of dengue severity [5] and that this may relate to the role of NS1 in focusing virus assembly [6, 7]. A puzzling aspect remains which is that the severity of DHF peaks days after NS1 levels have diminished [8], indicating that other NS1 related factors may be in play. Usutu virus (USUV) is another emerging flavivirus, first identified in South Africa in 1959, but recently associated with clinical cases in southern Europe [9], and now considered a threat to Latin America [10]. While not associated with major disease outbreaks in endemic areas, Usutu virus has been linked to fever, rash, and meningioencephalitis [9].

[0005] There is a compelling and urgent need for development of preventive and therapeutic interventions and diagnostics for the emerging flaviviruses. The present invention builds on immunoinformatic analyses which have identified mechanisms of autoimmune pathogenesis, and which identify key epitopes and, hence, provide compositions and methods for design of countermeasures and diagnostics for dengue, Zika, and Usutu virus.

[0006] The present invention also builds on immunoinformatic analysis which has identified epitope commonalities between Zika and its related flaviviruses and Plasmodium falciparum and Plasmodium vivax. The invention provides compositions and methods based on identification of Plasmodium epitopes which cross react with Zika and related flaviviruses.

### SUMMARY OF THE INVENTION

[0007] The present invention relates to vaccine compositions and therapeutic interventions for treating and preventing flavivirus infection and disease. It further relates to diagnostics for flavivirus infection. In particular, the present invention pertains to the design of interventions for flaviviruses based on understanding of epitope mimics within the virus structural and non-structural proteins which may contribute to pathogenesis through autoimmune mechanisms. The present invention addresses particularly compositions and methods for the above pertaining to Zika virus, dengue viruses, and Usutu virus. The present invention addresses the cross reactions between flaviviruses and malaria and provides vaccine compositions and differential diagnostics based on the identification of cross reacting epitopes.

[0008] Vaccines

[0009] In one embodiment the present invention uses immunoinformatic modelling to characterize the distribution of epitopes in the structural proteins of flaviviruses, including Zika virus, and to differentiate those among Zika virus strains, as well as between Zika virus and other co-endemic flaviviruses such as dengue and yellow fever, and to differentiate Zika virus from West Nile virus and Usutu virus.

[0010] In particular embodiments of the invention, the synthetic sub polypeptides of the virus proteins are from the envelope protein or NS1 protein of Zika virus and other flaviruses and have been engineered to remove or to mutate peptides which are identified as epitope mimics for human proteins. Such epitope mimics may cause the antibodies elicited in response to viral infection to bind to, and compromise the function of, identical B cell epitopes on the human protein. In other instances such epitope mimics may compete for binding with other ligands which would otherwise bind the corresponding peptides in human proteins.

[0011] In some cases, the human proteins are proteins which affect neurologic function and development. In particular cases the epitope mimics occur in human neuropeptide Y. In yet other embodiments, the mimic is in another neural protein, including but not limited to neurotrophin 4, neural cell adhesion molecule, neuron navigator, neurogenic differentiation factor, glial fibrillary acidic protein, glycoprotein M6A and others. In yet further embodiments, the epitope mimics occur in other neural proteins including but not limited to optineurin and brain derived neurotrophic factor, cochlin, synaptogyrin, and SNP29.

[0012] In one preferred embodiment a mimic epitope in NS1 is removed by mutation or by replacement with a scrambled motif. The mimic epitope is one which mimics an amino acid motif on a protein associated with microcephaly. In a particular embodiment the mimic motif is one that is found in abnormal spindle-like microcephaly associated protein (ASPM).

[0013] In one embodiment, the present invention uses immunoinformatic modelling to characterize the distribution of epitopes in the NS1 proteins of flaviruses and to differentiate those between dengue, Zika virus and other flaviviruses including, but not limited to, yellow fever, West Nile virus, Usutu, Tickborne encephalitis, and Japanese encephalitis virus.

[0014] Some embodiments of the present invention also identify epitope mimics which arise in dengue virus, Zika virus, and Usutu virus which match epitopes in the human protein in proteins which function in the cardiovascular proteins of the human proteome and may contribute to autoimmune responses manifest in clinical signs especially in Zika and in dengue. In one particular embodiment the invention identifies the desirability of removing B cell epitope mimics in the NS1 C terminal loop of dengue, Zika viruses, by mutation, deletion or replacement, to mitigate the likelihood of these epitopes stimulating autoimmune antibodies to proteins with cardiovascular functions, including but not limited to, clotting factors, von Willebrand factor, ADAMTS13, prothrombin and vascular endothelial growth factors and receptors of these. In particular embodiments vaccines for Zika and dengue are described in which such cardiovascular protein mimics are removed; in yet other embodiments host cells and vectors expressing vaccine synthetic polypeptides are described.

[0015] Additional epitope mimics are found in PrM protein and NS3 protein for human CDK5Rap2 protein, in NS4B for ASPM and for centromere protein 135; therefore in particular embodiments the removal mutation or deletion of these epitope mimics is provided. Accordingly, the present invention provides synthetic or variant viral polypeptide sequences that have a mutation such as a substitution mutation or deletion mutation in one of the identified sequences. In some embodiments, the mutation is a deletion mutation that removes all or part of the epitope mimic so that the polypeptide does not cross react with antibodies specific for the wild type epitope mimic. In some embodiments, the mutation is a substitution mutation or insertion mutation that alters the epitope mimic so that the polypeptide does not cross react with antibodies specific for the wild type epitope mimic.

[0016] An embodiment of the invention is the design of vaccines which can be administered to subjects at risk of infection to prevent primary Zika virus infection or infection with other flaviviruses and to direct antibody responses to preferred epitopes.

[0017] In one embodiment, the invention describes the expression of the soluble component of the Zika virus envelope protein in a mammalian cell line as a standalone synthetic polypeptide. In a further embodiment, the soluble component of envelope protein is expressed as a synthetic polypeptide fusion to at least a part of an immunoglobulin molecule. In some embodiments thereof the immunoglobulin molecule is engineered to remove Fc binding regions.

[0018] In further embodiments the invention describes the preparation of subviral particles comprising PrM and envelope proteins of Zika virus in which epitope mimics of interest have been mutated. In some embodiments subviral particles are prepared comprising PrM and envelope proteins of Zika virus from which a cross reactive epitope for dengue and other flaviviruses has been mutated to prevent cross reactivity.

[0019] In some embodiments the synthetic polypeptides embodied in this invention may be expressed in a mammalian cell line, harvested, and delivered directly to the subject. In yet other embodiments the synthetic polypeptide may be incorporated into a particular delivery vehicle including but not limited to a nanoparticle or virus-like particle. In yet other embodiments a Zika virus synthetic envelope polypeptide, engineered to delete or mutate epitope mimics, may be incorporated as a chimera or pseudotype into a live virus vaccine where other proteins are derived from a heterologous flavivirus. In some particular embodiments the heterologous flavivirus may be a yellow fever vaccine strain. In further embodiments the Zika virus synthetic envelope polypeptide, engineered to delete or mutate epitope mimics is delivered in a viral vector, including but not limited to an adenoviral vector or a poxvirus vector. In yet other embodiments other modes of expression of the virus polypeptide are used which in some embodiments includes expression in a prokaryotic system. In some embodiments, DNA encoding the synthetic polypeptides embodied herein are delivered directly to a patient.

[0020] As a supporting embodiment to those described above, this invention also embodies the cell lines which express the proteins, polypeptides, peptides and fusions thereof and the vectors which comprise the genetic constructs of proteins, polypeptides, peptides and fusions thereof.

[0021] In some embodiments of the present invention describe the preparation of antibodies for diagnostic or therapeutic use in the management of Zika virus infection. Such antibodies may be prepared by immunization of a laboratory animal with one of the synthetic Zika virus envelope polypeptides prepared as described for vaccines, including but not limited to whole soluble Zika virus envelope protein, and various sub-polypeptides thereof. In some cases, the Zika envelope polypeptide used as an immunogen may be fused to an immunoglobulin or portion thereof. In other particular embodiments the Zika virus polypeptide has been mutated or engineered to delete or abrogate an epitope mimic for a human proteome protein, in particular for human proteins with neurologic function, as described for vaccines. In some instances, the immunoglobulin is prepared by immunization with a short peptide linked to a carrier to ensure an epitope specific antibody. In some embodiments the immunoglobulins prepared by immunization with a synthetic Zika polypeptide are used to treat a subject affected by or at risk of infection by Zika virus. In other embodiments the antibodies thus prepared are used as a component of a diagnostic reagent.

[0022] Diagnostics

[0023] In some embodiments of the present invention, peptides identified as being unique to Zika virus may be expressed or synthesized as a component of a diagnostic aid or kit. In yet other embodiments the peptides which are diagnostic of Zika virus infection may be combined in the form of a diagnostic kit with distinct diagnostic peptides from co-endemic viruses from which differential diagnosis is needed. In some particular embodiments, such other viral peptides are from dengue viruses of serotypes 1-4, yellow fever, West Nile virus, Usutu virus.

[0024] One embodiment of the present invention provides a peptide-based diagnostic kit which enables differentiation between Zika virus infection and infection by dengue serotypes 1-4 or yellow fever, or prior vaccination by dengue or yellow fever. In yet additional preferred embodiments a peptide based diagnostic kit provides for differentiation between flavivirus infection, and other arboviruses including chikungunya virus. A further diagnostic kit allows differentiation of Zika and related flaviviruses from other potentially co-endemic organisms such as, but not limited to Saint Louis Encephalitis virus, hepatitis C, Japanese encephalitis virus, parvovirus 19, enteroviruses, Ross River virus, Eastern equine encephalitis, and Plasmodium spp.

[0025] Dengue

[0026] Some embodiments of the present invention also identify epitope mimics which arise in dengue virus and which bind to neurologic proteins. In some embodiments, the mimics are found in neuropeptide Y. In some specific embodiments, the epitope mimics identified are found only in dengue type 3. In yet other embodiments the mimics are found in isoforms of neural navigator protein 2. In some specific embodiments, the epitope mimics identified are found only in dengue type 1. In particular embodiments this invention includes synthetic polypeptides which comprise mutated epitopes of dengue virus that abrogate the mimic for a neural protein. Some embodiments provide for uses of the synthetic polypeptides comprising mutated dengue epitopes in the preparation of vaccines, therapeutics and diagnostics. Similarly, the invention includes the use of DNA and vectors which encode the synthetic polypeptides comprising mutated dengue epitopes and host cells which express them.

[0027] Usutu Virus

[0028] A further series of embodiments pertain to Usutu virus (USUV), an emerging flavivirus. These embodiments provide epitopes which may be used in diagnostic differentiation of this virus from other flaviviruses. In yet another embodiment potential epitope mimics in USUV are described enabling the design of a vaccine which avoids inclusion of such mimics. Some vaccine embodiments are based on NS1 while yet others are based on structural proteins.

[0029] Malaria Cross Reactivity

[0030] The present invention also relates to vaccine compositions for preventing Zika virus infection and disease. It also relates to monitoring the epidemiology of Zika virus. In particular, the present invention pertains to the design of interventions for Zika virus based on understanding of antibody stimulating epitopes in Plasmodium species which elicit antibodies which cross react with Zika virus and other flaviviruses.

[0031] In one embodiment of this invention, synthetic polypeptides and peptides are described which comprise pentameric and hexameric B cell epitopes of flaviviruses which match B cell epitopes in Plasmodium spp parasites. In some instances, the pentamer B cell epitopes are found in Zika virus, in other instances in a serotype of dengue virus or yellow fever. Matching B cell epitopes are found in Plasmodium falciparum or in Plasmodium vivax. However, these examples are not limiting and other species of Plasmodium such as, but not limited to, P. ovale and P. malariae may also carry flavivirus matching epitopes. In some particular embodiments, the Zika matching B cell epitopes are conserved in at least 10 diverse geographical isolates of Plasmodium. In some embodiments, the flavivirus B cell epitope is found in the envelope protein, in other embodiments in the NS1 protein and in yet other embodiments in other proteins encoded by the flavivirus polyprotein. In some embodiments, the synthetic peptide from Plasmodium may be 5 amino acids, in other instances it may be up to 16 amino acids and in yet other embodiments the peptide may be comprised within an extended polypeptide of up to 100 amino acids. In particular embodiments, the peptides comprising matching epitopes are unique to each particular flavivirus and Plasmodium, such that the Plasmodium matching peptides do not give rise to cross reactions between individual flaviviruses (eg. cross reactions between Zika and dengue). The present invention further provides for a host cell encoding the synthetic peptides or polypeptides carrying the B cell epitopes.

[0032] In a further group of embodiments the present invention is a vaccine which comprises immunogenic synthetic peptides of Plasmodium which elicit antibodies that provide neutralization of a particular flavivirus and protection to infection by the flavivirus. In some preferred embodiments the flavivirus is a Zika virus; in others it is a dengue virus and in yet others a yellow fever virus. In particular embodiments the immunogenic synthetic peptides are derived from P falciparum liver specific protein 1, a Plasmodium falciparum erythrocyte membrane protein or from Plasmodium falciparum conserved protein Pf3D71122600 or from PF3D7_1408700 conserved Plasmodium protein. In preferred embodiments the vaccine may be delivered to the subject to be protected as a soluble preparation, in other instances it is particulate. The vaccine immunogen peptide maybe encoded in a viral vector or in a nucleotide sequence, and in some particular embodiments may comprise a denatured or partially inactivated polypeptide. In some particular embodiments a vaccine immunogen peptide derived from a Plasmodium protein may be complemented by addition of a T helper epitope, a peptide which binds to an MHC H molecule, derived from Zika virus.

[0033] Having described a novel vaccine design comprising epitopes shared with Plasmodium, the present invention also provides, in another embodiment, a method for protecting a subject from infection or disease caused by a flavivirus by immunization with the vaccine. In one particular embodiment, the subject may be protected from Zika virus infection and disease; in other embodiments protection is desired from dengue or yellow fever.

[0034] In one embodiment, the present invention provides a means of diagnosis of specific flavivirus infections and differential diagnosis from prior malaria infection. In a further preferred embodiment it provides a diagnostic kit for conducting the differential diagnosis.

[0035] A further embodiment of the present invention is to provide a means of therapeutic intervention in flavivirus infection, and more particularly in Zika virus infection and disease by administration of antibodies to Plasmodium. In some particular embodiments the antibodies are elicited by epitopes in proteins of P falciparum; in yet other embodiments, the antibodies are elicited by epitopes in proteins of P. vivax. In particular instances the antibodies are elicited by P falciparum liver specific protein 1, by a Plasmodium falciparum erythrocyte membrane protein or Plasmodium conserved protein Pf3D71122600 or Plasmodium falciparum PF3D7_1408700 conserved Plasmodium protein.

[0036] Intervention Via Plasmapheresis

[0037] By identifying the epitope mimics which elicit autoimmune effects of Zika virus, and the human c proteins in which such epitope mimics are found, the present invention enables the treatment of Zika virus disease, or disease caused by other flaviviruses including but not limited to dengue and USUV, by the administration of replacement proteins or peptides. It further enables the treatment of affected subjects by the administration of peptides or peptidomimetics which will bind to the immunoglobulins directed to the epitopes and thereby mitigate the antibody mediated pathogenesis. Such proteins, peptides or peptidomimetics may be administered to subjects who are pregnant and carrying a fetus at risk of Zika antibody mediated pathogenesis. In further embodiments, the proteins, peptides or peptidomimetics are administered to subjects who develop other neurologic deficits and retinal disorders as a sequel of Zika virus infection. In yet other embodiments the proteins, peptides or peptidomimetics may be administered to subjects who are suffering from Guillain Barre like symptoms.

[0038] In yet further embodiments the peptides identified in Zika virus and in other flaviviruses as epitope mimics are used ex vivo as a medium for binding and removing reactive antibodies from plasma of a subject affected by a clinical manifestation of flavivirus infection. In some embodiments the mimic peptides are used alone, in other embodiments the peptides are linked via a tag (including but not limited to a histag or a FLAG tag) to a substrate. In some particular embodiments, the peptides, or peptidomimetics, thereof are used in plasmapheresis of a subject affected by a clinical manifestation of a Zika virus infection, including but not limited to Guillain Barré syndrome.

[0039] B Cell Ablation

[0040] A further embodiment described in the present invention is the elimination of B cell clones which make antibodies that target epitopes shared by flaviviruses, including but not limited to Zika, USUV, or dengue virus, and by a human protein. In particular embodiments the epitopes identified herein are fused to a cytocide or cytotoxin, which may or may not be radioactive, and the fusion the administered to a subject exposed to the flavivirus with the intent of specifically binding and killing reactive B cells.

[0041] Mutated Human Proteins

[0042] In some embodiments of the present invention, synthetic polypeptides are described which are derived from neural proteins and which incorporate amino acid mutations that mimic epitopes also found in Zika or dengue virus. In some particular embodiments the synthetic polypeptides are derived from the prepropeptide of neuropeptide Y. The synthetic polypeptides are used, in one embodiment, as a diagnostic aid for identification of prior Zika or dengue virus infections, and may be accompanied by controls which comprise abrogated or scrambled mimic epitopes.

[0043] In some embodiments of the present invention a synthetic peptide is expressed that is derived from a neurologic protein that contains an epitope mimic matching an epitope in Zika virus. Such synthetic polypeptides may include, for example, the native pentamer mimic motif or may have this replaced by a substitute pentamer or by a scrambled version of the mimic pentamer. In some preferred embodiments, the neurologic protein is drawn from the group comprising neuropeptide Y or neural navigator protein 2 (NAV2). In some embodiments, the synthetic polypeptides are then used in a serologic assay to detect antibodies to Zika, which also bind to the human proteins and which are thus indicators of potential adverse effects including, but not limited, to GBS and Zika fetal syndrome. Detection of such antibodies are used as a marker of risk or a surrogate marker for GBS and other neurologic sequelae of Zika infection.

### EXEMPLARY EMBODIMENTS

[0044] For example, in some embodiments, the present invention provides a synthetic Zika virus polypeptide comprising one or more B cell epitopes and one or more peptides that each bind with high affinity to three or more different MHC II molecules. In some embodiments, the polypeptide comprises B cell epitopes that are unique to Zika virus and do not elicit antibodies which cross react with a dengue virus. In some embodiments, the polypeptide comprises one or more altered or deleted epitope mimic sequences so that the sequence of the synthetic Zika virus polypeptide is altered in comparison to the corresponding wild type Zika virus polypeptide (e.g., the polypeptide comprising one or more altered or deleted epitope mimic sequences comprises a deletion or substitution mutation of one or more amino acids in the epitope mimic sequence so that the sequence of synthetic Zika virus polypeptide is altered in comparison to the corresponding wild type Zika virus polypeptide). In some embodiments, the epitope mimic sequence is found in a human neurologic protein (e.g., a human neurologic protein listed in tables 1, 6, 7, 8 or 9). In some embodiments, the epitope mimic sequences are selected from, for example, SEQ ID NOs: 1-34, 78-140, or 255-256. In some embodiments, the synthetic polypeptide comprises a Zika virus immunogen from an envelope polypeptide of Zika virus (e.g., Zika virus Domain I, Domain II, or Domain III polypeptides). In some embodiments, the Zika virus immunogen is an immunogen encoded by an amino acid sequence selected from, for example, amino acids 38-444 of SEQ ID NO: 142, amino acids 38-143 of SEQ ID NO: 144, amino acids 38-125 of SEQ ID NO: 146, amino acids 38-113 of SEQ ID NO: 148, amino acids 24-429 of SEQ ID NO: 150, amino acids 24-128 of SEQ ID NO: 152, amino acids 24-110 of SEQ ID NO: 154, amino acids 24-98 of SEQ ID NO: 156, amino acids 30-435 of SEQ ID NO: 158, amino acids 30-134 of SEQ ID NO: 160, amino acids 30-116 of SEQ ID NO: 162, amino acids 30-104 of SEQ ID NO: 164, amino acids 38-143 of SEQ ID NO: 166, amino acids 24-128 of SEQ ID NO: 168, amino acids 30-134 of SEQ ID NO: 170, or amino acids 38-444 of SEQ ID NO: 254. In some embodiments, the epitope mimic sequence is found in a human microcephaly associated protein (e.g., CDKRAP2, ASPM, or CEP135). In some embodiments, the epitope mimic sequence is selected from the group of epitope mimic sequences identified by SEQ ID NOs: 452-456. In some embodiments, the synthetic polypeptide comprises a Zika virus immunogen from a Zika virus protein selected from PrM, NS1, NS3, or NS4B. In some embodiments, the Zika virus immunogen is an NS1 immunogen encoded by an amino acid sequence selected from, for example, amino acids 21 to 384 of SEQ ID NO:441, amino acids 21 to 213 of SEQ ID NO:443 or amino acids 21 to 213 of SEQ ID NO:445.

[0045] Further embodiments provide a synthetic flavivirus NS1 polypeptide comprising one or more B cell epitopes and that comprise peptides that bind with high affinity to three or more different MHC II molecules. In some embodiments, the polypeptide is selected from, for example, a dengue virus NS1 polypeptide, Zika virus NS1 polypeptide, West Nile virus NS1 polypeptide, Yellow fever virus NS1 polypeptide, Usutu virus NS1 polypeptide, Japanese encephalitis virus NS1 polypeptide, Tickborne encephalitis virus NS1 polypeptide, or St Louis encephalitis virus NS1 polypeptide. In some embodiments, the polypeptide comprises one or more altered or deleted epitope mimic sequences so that the sequence of the synthetic polypeptide is altered in comparison to the corresponding wild type virus polypeptide. In some embodiments, the polypeptide comprising one or more altered or deleted epitope mimic sequences comprises a deletion or substitution mutation of one or more amino acids in the epitope mimic sequence so that the sequence of the synthetic virus polypeptide is altered in comparison to the corresponding wild type virus polypeptide. In some embodiments, the epitope mimic sequence matches an epitope motif in a human cardiovascular protein (e.g., a human protein expressed in vascular endothelium or in platelets). In some embodiments, the human cardiovascular protein is selected from, for example, ADAMTS13, Coagulation factor V, Coagulation factor VIII, Plasminogen, Platelet glycoprotein Ib beta chain, Vascular endothelial growth factor A, Vascular endothelial growth factor B, Vascular endothelial growth factor receptor 1, Vascular endothelial growth factor receptor 2, von Willebrand factor or Platelet endothelial aggregation receptor 1. In some embodiments, the epitope mimic sequences are selected from the group of epitope mimic sequences identified by SEQ ID NOs: 1106-1123. In some embodiments, the epitope mimic sequence matches an epitope motif in a human protein with neurologic function. In some embodiments, the epitope mimic sequences are selected from, for example, SEQ ID NOs: 1124-1125 and 1138-1149. In some embodiments, the synthetic polypeptide comprises Zika PrM and Env proteins in operable linkage. In some embodiments, the polypeptide is encoded by amino acids 25 to 603 of SEQ ID NO:258, amino acids 25 to 603 of SEQ ID NO:260, or amino acids 25 to 603 of SEQ ID NO:262. In some embodiments, the synthetic polypeptide comprises one or more altered or deleted pan-flavivirus epitopes so that the sequence of the synthetic Zika virus polypeptide is altered in comparison to the corresponding wild type Zika virus polypeptide. In some embodiments, the pan-flavivirus epitope is DRGWG (SEQ ID NO:554).

[0046] Further embodiments provide a fusion protein comprising the synthetic polypeptides described herein. In some embodiments, the fusion protein comprises a peptide sequence selected from a signal sequence, a linker sequence, a purification tag sequence and an immunoglobulin sequence in operable association with the synthetic polypeptide. In some embodiments, the peptide sequence is exogenous to the synthetic polypeptide sequence. In some embodiments, the immunoglobulin sequence is a constant region sequence.

[0047] Yet other embodiments provide a nucleic acid or a vector comprising a nucleic acid sequence encoding a synthetic polypeptide or fusion protein described herein. In some embodiments, the nucleic acid sequence encoding a synthetic polypeptide or fusion protein is operably linked to an exogenous promoter.

[0048] Still other embodiments provide a host cell comprising the vector or nucleic acid described herein.

[0049] Certain embodiments provide a vaccine comprising a synthetic peptide or fusion protein described herein and a pharmaceutically acceptable carrier. In some embodiments, the vaccine further comprises an adjuvant. In some embodiments, the vaccine is a soluble formulation. In some embodiments, the vaccine is provided as a particulate delivery vehicle. In some embodiments, the synthetic peptide or fusion protein is incorporated into a viral vector (e.g., a chimeric or pseudotyped viral particle). In some embodiments, the chimeric or pseudotyped virus comprises a viral protein of a virus that is heterologous to the synthetic polypeptide or fusion protein, or the synthetic polypeptide or fusion protein is displayed on a surface of a heterologous viral particle. In some embodiments, the synthetic polypeptide or fusion protein comprises more than one scrambled mimics or a pentamer that each replaces an epitope mimic sequence. In some embodiments, the present invention provides a DNA vaccine comprising a nucleic acid sequence described herein. In some embodiments, the nucleic acid is incorporated into a chimeric or pseudotyped viral particle. In some embodiments, the vaccine is naked DNA. In some embodiments, the nucleic acid is in a eukaryotic expression vector or an adenoviral vector. In some embodiments, the vaccine comprises the nucleic acid inserted into an attenuated flavivirus genome (e.g., yellow fever virus). In some embodiments, the nucleic acid is in a virus like particle.

[0050] In further embodiments, the present invention provides an antibody prepared by immunization of a subject with a synthetic polypeptide described herein. In some embodiments, the antibody comprises an immunoglobulin from which the Fc binding region has been removed.

[0051] In yet other embodiments, the present invention provides a diagnostic system for detection of antibodies to flavivirus virus comprising one or more synthetic peptide epitopes of Zika virus immobilized on a solid or semisolid support. In some embodiments, the solid or semisolid support is selected from, for example, a bead, a chip, a tube, or a multiwell plate. In some embodiments, the one or more synthetic peptide epitopes are covalently attached to the solid or semisolid support. In some embodiments, the one or more synthetic peptide epitopes are attached to the solid or semisolid support via a linker. In some embodiments, the solid or semisolid support is functionalized or treated to facilitate the immobilization. In some embodiments, one or more synthetic peptide epitopes comprise epitopes specific for serum antibodies of Zika virus and epitopes specific for serum antibodies of other flaviviruses (e.g., Dengue virus serotypes, West Nile virus, and Yellow Fever virus, or Usutu virus). In some embodiments, the one or more epitopes are specific for serum antibodies of flaviviruses and do not bind to serum antibodies from Chikungunya virus. In some embodiments, the synthetic peptides correspond to envelope proteins of one or more flaviviruses (e.g., NS1). In some embodiments, one or more synthetic peptide epitopes comprise the pentamer ESTEN (SEQ ID NO: 31), SEQ ID NO: 172 or 173, or the pentamer STTAS (SEQ ID NO: 1239). In some embodiments, the one or more synthetic epitopes are selected based on having competitive B cell binding in the top 10% of all peptides from the protein from which they are derived. In some embodiments, the one or more synthetic epitopes are selected to bind to antibodies with a dissociation constant less than 10⁻⁷ M. In some embodiments, the peptides are pentamers. In some embodiments, the pentamers are flanked by regions of 5-10 amino acids each side of the pentamer. In some embodiments, the peptides are selected from peptides listed in Table 12, Table 16 and Table 17 and the system further comprises: a. 1 to 4 pentamers each of which is specific to Zika virus; b. 1 to 4 pentamers each of which is specific to dengue serotype 1; c. 1 to 4 pentamers each of which is specific to dengue serotype 2; d. 1 to 4 pentamers each of which is specific to dengue serotype 3; e. 1 to 4 pentamers each of which is specific to dengue serotype 4, and f. 1 to 4 pentamers each of which is specific to yellow fever. In some embodiments, the peptides are pentamers selected from SEQ ID NOs: 263-391, 519-589, 647-70, and 1247-1256 or combinations thereof. In some embodiments, the peptides are 15-mers and selected from SEQ ID NOs: 446-518 and 590-646 or combinations thereof. In some embodiments, the system further comprises: a. 1 to 4 peptides each of which is specific to West Nile virus and b. 1 to 4 peptides each of which is specific to Chikungunya virus. In some embodiments, the system comprises one or more synthetic peptides comprising B cell epitopes located in Domain I, Domain II or Domain III of the envelope protein of Zika virus. In some embodiments, the epitopes cross reacting with dengue or yellow fever have been removed or mutated from the Zika virus synthetic polypeptides. In some embodiments, the synthetic polypeptides comprise a sequence selected from SEQ ID NOs. 393, 395 or 397. In some embodiments, the diagnostic system comprises at least 3 different synthetic polypeptide sequences in the configuration CXXRGXXXRXTTXXGXXXXXWC (SEQ ID NO: 1245), wherein X is any amino acid. In some embodiments, the diagnostic system further comprises three or more synthetic polypeptides of the sequences selected from SEQ ID NOs. 1138-1149 or 1150-1160. In some embodiments, the system further comprises one or more polypeptides peptides from at least one additional flavivirus immobilized on a solid or semisolid support. In some embodiments, the synthetic peptide epitopes facilitate differentiation of serum antibodies to Zika virus and Plasmodium spp. In some embodiments, the system comprises synthetic peptide epitopes that bind to serum antibodies to Zika virus but not to serum antibodies to Plasmodium spp. In some embodiments, the system comprises synthetic peptide epitopes that bind to serum antibodies to Plasmodium spp. but not to serum antibodies to Zika virus. In some embodiments, the diagnostic system further comprises a. a set of one or more peptides comprising pentamers selected from SEQ ID NOs.: 705-758 and b. one or more pan-flavi peptides selected from SEQ ID NOs.: 552-559.

[0052] In other embodiments, the present invention provides a diagnostic system comprising one or more peptides selected from SEQ ID NOs.: 1058-1093 or a pan-flavivirus peptide comprising the amino acid sequences DRGWG or RGWGN.

[0053] In certain embodiments, the present invention provides a diagnostic system for detection of antibodies to Usutu virus comprising one or more peptides selected from SEQ ID NOs.: 1219-1230 or 1231-1238 immobilized on a solid or semisolid support. In some embodiments, the synthetic peptide epitopes are each fused to a linker (e.g., a histag or a FLAG tag or biotin). In some embodiments, the peptides are affixed directly or indirectly to the solid or semi solid substrate. In some embodiments, the the diagnostic systems further comprise a second antibody specific for human antibodies or non-human antibodies. In some embodiments, the second antibody is detectably labelled. In some embodiments, the second antibody detects either bound human IgG or IgM. In some embodiments, the second antibody detects a bound antibody of a non-human species.

[0054] In some embodiments, the present invention provides for the use of the diagnostic systems described above for the diagnosis of infection by a flavivirus, including, but not limited to, Zika virus, Dengue virus, West Nile virus, Yellow Fever virus, or Usutu virus.

[0055] In still further embodiments, the present invention provides a synthetic polypeptide comprising a variant dengue envelope protein having one or more altered or deleted epitope mimic sequences so that the sequence of the synthetic variant dengue envelope protein is altered in comparison to the corresponding wild type dengue virus protein. In some embodiments, the polypeptide comprising one or more altered or deleted epitope mimic sequences comprises a deletion or substitution mutation of one or more amino acids in the epitope mimic sequence so that the sequence of synthetic polypeptide is altered in comparison to the corresponding wild type polypeptide. In some embodiments, the epitope mimic sequence matches an epitope motif in a neurologic protein (e.g., neuropeptide Y or neural navigator protein 2). In some embodiments, the epitope mimic sequence is GEDAP (SEQ ID NO: 38) or TDKEK (SEQ ID NO: 56).

[0056] In yet other embodiments, the present invention provides a chimeric or pseudotyped viral particle comprising the synthetic polypeptides described herein.

[0057] Further provided herein is a synthetic Usutu virus structural polypeptide comprising one or more B cell epitopes and one or more peptides that each bind with high affinity to 3 or more different MHC II molecules. In some embodiments, the polypeptide comprises one or more altered or deleted epitope mimic sequences so that the sequence of the synthetic Usutu virus polypeptide is altered in comparison to the corresponding wild type Usutu virus polypeptide. In some embodiments, the polypeptide comprising one or more altered or deleted epitope mimic sequences comprises a deletion or substitution mutation of one or more amino acids in the epitope mimic sequence so that the sequence of synthetic Usutu virus polypeptide is altered in comparison to the corresponding wild type Usutu virus polypeptide. In some embodiments, the epitope mimic matches an epitope motif in a human protein with cardiovascular function, neurologic function, or microcephaly related protein. In some embodiments, the epitope mimic sequence is selected from SEQ ID NOs.: 1161-1210. In some embodiments, the synthetic polypeptide is amino acids 24 to 523 of SEQ ID NO.:1212 or amino acids 24 to 523 of SEQ ID NO: 1216.

[0058] Also provided herein is a Plasmodium synthetic polypeptide or peptide comprising a pentamer amino acid sequence also found in a B cell epitope peptide of a flavivirus. In some embodiments, the pentamer amino acid sequence is found in a B cell epitope of a flavivirus envelope protein or a flavivirus NS1 protein. In some embodiments, the polypeptide or peptide is from 5 to 100 amino acids in length. In some embodiments, the Plasmodium species is P. falciparum or P. vivax. In some embodiments, the polypeptide or peptide is derived from the Plasmodium vivax and Plasmodium falciparum proteins listed in Tables 20 to 23. In some embodiments, the polypeptide or peptide is derived from Plasmodium falciparum liver specific protein 1, or Plasmodium conserved protein Pf3D71122600 or PF3D7_1408700 conserved Plasmodium protein. In some embodiments, the polypeptide or peptide comprises a pentamer selected from SEQ ID NOs.: 705-738. In some embodiments, the polypeptide or peptide comprises a pentamer selected from SEQ ID NOs.: 739-758, NOs.: 647, 759-964 or 965-1057 and 1246. In some embodiments, the polypeptide or peptide comprises a 15-mer or 16 mer amino acid sequence selected from SEQ ID NOs.: 1058-1093. In some embodiments, the polypeptide or peptide comprises amino acids 24 to 84 of SEQ ID NO.: 1095. In some embodiments, the synthetic polypeptide or peptide is operably linked to a synthetic peptide sequence comprising a T cell epitope from Zika virus. In some embodiments, the polypeptide or peptide comprises amino acids 22 to 94 of SEQ ID NO.: 1105. In some embodiments, immunization with the synthetic polypeptide or peptide elicits antibodies binding Zika virus which do not cross react with dengue virus or Yellow fever virus.

[0059] Yet other embodiments provide a method of protecting a subject at risk of contracting Zika virus disease by vaccinating with a vaccine as described herein.

[0060] Provided herein is the use of a vaccine described herein to immunize a subject.

[0061] Further provided herein is a method of differentiating a prior infection by Zika virus from a prior malaria infection comprising assaying the binding of serum antibodies of a subject to a set of one or more peptides comprising pentamers selected from SEQ ID NOs.: 705 to 758 or one or more pan flavi peptides selected from SEQ ID NOs.: 552-559.

[0062] Also provided herein is a a plasmapheresis substrate comprising a solid or semi-solid support selected from a particle, a filter, a gel, or a mesh comprising synthetic peptide or polypeptide which binds to an antibody elicited by a flavivirus protein epitope mimic for a human protein, wherein the plasma of a subject affected by the flavivirus is exposed and to which antibodies therein are bound. In some embodiments, the peptide is derived from an envelope protein or an NS1 protein. In some embodiments, the flavivirus is a Zika virus a dengue virus, or an Usutu virus. In some embodiments, the human protein is a protein with neurologic function or cardiovascular function.

[0063] In still other embodiments, the present invention provides a method of removing antibodies from a subject in need thereof comprising contacting the serum of the patient with the plasmapheresis substrate described herein so that the antibodies are bound and returning the serum to the patient.

[0064] Provided in certain embodiments is a method of ablation of B cells that are producing antibodies reactive with epitope mimics shared by a flavivirus and a human protein comprising: preparing a fusion polypeptide comprising an epitope mimic peptide fused to a cytocide or cytotoxin; and administering the fusion polypeptide to a subject. In some embodiments, the epitope mimic is derived from an envelope protein or an NS1 protein of a flavivirus (e.g., a Zika virus, a dengue virus, or an Usutu virus). In some embodiments, the human protein is a protein with neurologic function or cardiovascular function. In some embodiments, the epitope mimic peptide is one or more of SEQ ID NOs.: 1-140, 255-256, 1106-1125 or 1138-1149. In some embodiments, the fusion polypeptide further comprises a peptide with the configuration CXXRGXXXRXTTXXGXXXXXWC (SEQ ID NO: 1245), wherein X is any amino acid.

[0065] Provided in some embodiments is a fusion polypeptide comprising an epitope mimic peptide of a flavivirus fused to a cytocide or cytotoxin.

[0066] In some embodiments, provided herein is a synthetic polypeptide derived from a human neurologic protein comprising one or more altered or deleted epitope mimic sequences so that the sequence of the synthetic polypeptide is altered in comparison to the corresponding wild type neurologic protein and wherein the epitope mimic sequence is shared with a B cell epitope in a Zika virus or dengue virus.

[0067] In other embodiments, the present invention provides a synthetic human neurological polypeptide comprising one or more altered or deleted epitope mimic sequences so that the sequence of the synthetic neurological polypeptide is altered in comparison to the corresponding wild type neurological polypeptide and wherein the epitope mimic sequence is shared with a B cell epitope in a Zika virus or dengue virus. In some embodiments, the polypeptide comprising one or more altered or deleted epitope mimic sequences comprises a deletion or substitution mutation of one or more amino acids in the epitope mimic sequence so that the sequence of synthetic neurological polypeptide is altered in comparison to the corresponding wild type neurological polypeptide. In some embodiments, the human neurological polypeptide is proneuropeptide Y or neuron navigator 2. In some embodiments, the polypeptide comprises an amino acid sequence selected from, for example, amino acids 35-104 of SEQ ID NO: 174, amino acids 35-104 of SEQ ID NO:176, amino acids 35-104 of SEQ ID NO:178, amino acids 35-104 of SEQ ID NO: 180, amino acids 35-104 of SEQ ID NO:182, amino acids 30-270 of SEQ ID NO:236, amino acids 30-270 of SEQ ID NO:238, amino acids 30-270 of SEQ ID NO:240, amino acids 30-270 of SEQ ID NO:242, amino acids 30-280 of SEQ ID NO:244, amino acids 30 to 269 of SEQ ID NO.: 399, amino acids 30 to 269 of SEQ ID NO.:401, amino acids 30 to 269 of SEQ ID NO.:403, amino acids 30 to 269 of SEQ ID NO.:405, amino acids 30 to 279 of SEQ ID NO.:407, amino acids 268 to 507 of SEQ ID NO.:409, amino acids 268 to 507 of SEQ ID NO.:411, amino acids 268 to 507 of SEQ ID NO.:413, amino acids 268 to 507 of SEQ ID NO.:415, amino acids 268 to 507 of SEQ ID NO.:417, amino acids 30 to 100 of SEQ ID NO.:419, amino acids 30 to 100 of SEQ ID NO.:421, amino acids 30 to 100 of SEQ ID NO.:423, amino acids 30 to 100 of SEQ ID NO.:425, amino acids 30 to 110 of SEQ ID NO.:427, amino acids 268 to 338 of SEQ ID NO.:429, amino acids 268 to 338 of SEQ ID NO.:431, amino acids 268 to 338 of SEQ ID NO.:433, amino acids 268 to 338 of SEQ ID NO.:435, or amino acids 268 to 348 of SEQ ID NO.:437.

[0068] Other embodiments provide a synthetic polypeptide derived from a human microcephaly associated protein comprising one or more altered or deleted epitope mimic sequences so that the sequence of the synthetic polypeptide is altered in comparison to the corresponding wild type human microcephaly associated protein and wherein the epitope mimic sequence is shared with a B cell epitope in a Zika virus or dengue virus. In some embodiments, the polypeptide comprising one or more altered or deleted epitope mimic sequences comprises a deletion or substitution mutation of one or more amino acids in the epitope mimic sequence so that the sequence of synthetic polypeptide is altered in comparison to the corresponding wild type human microcephaly associated protein (e.g., ASPM).

[0069] Further embodiments are described herein.

### DESCRIPTION OF THE FIGURES

[0070] FIG. 1: Permuted population plot of the envelope of Zika virus (SPH2015, Brazil) showing location of B cell epitopes and population based MHC I and MHC II binding. In this population permuted plot: Predicted MHC-I (red line), MHC-II (blue line) binding, and probability of B cell binding (orange lines) for each peptide, arrayed N-C, for a permuted population comprising 63 human MHCs. Ribbons (Red=MHC-I, Blue-MHC-II) indicate the top 25% affinity binding. Orange bars indicate high probability B-cell binding. Background shading shows membrane (green) extramembrane (yellow), intramembrane (pink).

[0071] FIG. 2: Permuted population plot of the capsid protein of Zika virus (SPH2015, Brazil) showing location of B cell epitopes and population based MHC I and MHC II binding. In this population permuted plot: Predicted MHC-I (red line), MHC-II (blue line) binding, and probability of B cell binding (orange lines) for each peptide, arrayed N-C, for a permuted population comprising 63 human MHCs. Ribbons (Red=MHC-I, Blue-MHC-II) indicate the top 25% affinity binding. Orange bars indicate high probability B-cell binding. Background shading shows membrane (green) extramembrane (yellow), intramembrane (pink).

[0072] FIG. 3: Permuted population plot of the PrM of Zika virus (SPH2015, Brazil) showing location of B cell epitopes and population based MHC I and MHC II binding. In this population permuted plot: Predicted MHC-I (red line), MHC-II (blue line) binding, and probability of B cell binding (orange lines) for each peptide, arrayed N-C, for a permuted population comprising 63 human MHCs. Ribbons (Red=MHC-I, Blue-MHC-II) indicate the top 25% affinity binding. Orange bars indicate high probability B-cell binding. Background shading shows membrane (green) extramembrane (yellow), intramembrane (pink).

[0073] FIG. 4: Maps comparing distribution of Plasmodium falciparum and Zika

[0074] A: From Cavalcanti et al, Journal of Infection in Developing Countries, 2016 Distribution of reported Zika microcephaly cases in Brazil. B. Distribution of P. falciparum distribution in Brazil. C. Distribution of P. falciparum distribution globally.

[0075] FIG. 5. Comparative envelope epitope for JEV (top) and yellow fever (bottom), both reference strains. In this population permuted plot: Predicted MHC-I (red line), MHC-II (blue line) binding, and probability of B cell binding (orange lines) for each peptide, arrayed N-C, for a permuted population comprising 63 human MHCs. Ribbons (Red=MHC-I, Blue-MHC-II) indicate the top 25% affinity binding. Orange bars indicate high probability B-cell binding. Background shading shows membrane (green) extramembrane (yellow), intramembrane (pink).

[0076] FIG. 6. Cluster analyses of 35 envelopes worldwide.

[0077] FIG. 7. Sharing pattern of pentamer motifs among 18 Flavivirus envelopes. Motifs in hatched boxes are those exclusive to the 3 Zika isolates analyzed.

[0078] FIG. 8. NPY Binding sites of mimic antibodies from Dengue 3 (GEDAP) and Zika (ESTEN).

[0079] FIG. 9. Mock-up of projected position of motifs in Domain 3 using JEV as a structural model.

[0080] FIG. 10. Top: Zika virus envelope protein showing NPY match “ESTEN” marked by arrow. Not it is associated with adjacent MHC II binding (blue line). Bottom: DEN3 isolate with NPY match “GEDAP” motif marked.

[0081] FIG. 11. Top: Zika, Bottom Den 3 showing difference in MHC II binding adjacent to pentamer motifs of interest located in pink box. This figure shows a hierarchical cluster of predicted binding of peptides to individual MHC-11 alleles. On the X axis 15-mer peptides respectively are indexed to their N terminal positions. Y axis indicates HLA alleles clustered by similarity of binding. Color index of pixels shows predicted binding affinity in standard deviations units (blue high affinity). Shows HLA which react similarly, as well as variability in binding affinity by peptide.

[0082] FIG. 12. Shows the position of the KGLRS mimic in Zika envelope Domain I and the TDKEK motif in dengue type 1 envelope Domain I using a Japanese encephalitis structural model as a surrogate model.

[0083] FIG. 13. Shows the position of the KGLRS mimic in Zika and the TDKEK motif in dengue type 1

[0084] FIG. 14. Shows the MHC II binding affinity for the KGLRS mimic in Zika and the TDKEK motif in dengue type 1

[0085] FIG. 15. Shows position of mimic peptides from Zika and dengue 1 in neural navigator 2 protein

[0086] FIG. 16: Shows the layout of synthetic polypeptides of neuropeptide Y and NAV2 wherein both native wild type and scrambled epitope mimics are included. Where not otherwise indicated, the sequence is the native sequence of the underlying human protein. YF indicates a motif recognized by antibodies to yellow fever. T indicates a tag which may be a histag. TT indicates a motif from tetanus toxin.

[0087] FIG. 17: Shows the location of the motif STTAS in the NS1 protein of Zika virus

[0088] FIG. 18: Shows position of STTAS in Zika NS1 (large arrow) and associated MHC II binding (small arrow)

[0089] FIG. 19: Shows the identification of the motif STTAS as being a high probability B cell epitope in both the NS1 protein and in human ASPM. The Y axis shows probability in the NS1 protein and the X axis shows probability in ASPM. In both cases probability is shown as a negative of the standard deviation from mean probability.

[0090] FIG. 20: NS1 dimer of dengue showing the location occupied by STTAS in ZIKA NS1

[0091] FIG. 21: Shows the location of the STTAS motif in the human ASPM protein

[0092] FIG. 22: Conservation and cross reactivity of selected envelope peptides within flaviviruses and chikungunya

[0093] FIG. 23: Conservation and cross reactivity of selected NS1 peptides within flaviviruses and chikungunya

[0094] FIG. 24: Cross reactivity of selected envelope peptides with other microorganisms

[0095] FIG. 25: Cross reactivity of selected NS1 peptides with other microorganisms

[0096] FIG. 26: Alignment of B cell epitopes in Zika (top) and dengue serotype 3 (bottom) with B cell epitopes in P falciparum and P vivax, in the fusion loop region of the Zika and dengue envelope protein which is the source of cross reactive antibodies, showing the absence of matching Plasmodium epitopes in this region at index amino acid positions ˜98-100.

[0097] FIG. 27: High probability B cell epitopes in Zika Envelope protein (top); with matching B cell epitopes in proteins of P. falciparum (middle) and P. vivax (bottom). B cell probability of binding is shown inverted; highest probability is indicated by a downward spike.

[0098] FIG. 28: High probability B cell epitopes in dengue serotype 3 Envelope protein (top); with matching B cell epitopes in proteins of P. falciparum (middle) and P. vivax (bottom). B cell probability of binding is shown inverted; highest probability is indicated by a downward spike.

[0099] FIG. 29: High probability B cell epitopes in dengue serotype 4 Envelope protein (top); with matching B cell epitopes in proteins of P. falciparum (middle) and P. vivax (bottom). B cell probability of binding is shown inverted; highest probability is indicated by a downward spike.

[0100] FIG. 30: High probability B cell epitopes in Zika NS1 protein (top); with matching B cell epitopes in proteins of P. falciparum (middle) and P. vivax (bottom). B cell probability of binding is shown inverted; highest probability is indicated by a downward spike.

[0101] FIG. 31: Comparison of the epitope patterns of NS1 for flaviviruses of interest. A population permuted plot is shown in which predicted MHC-I (red line), MHC-II (blue line) binding, and probability of B cell binding (orange lines) for each peptide, arrayed N-C, for a permuted population comprising 63 human MHCs. Ribbons (Red=MHC-I, Blue-MHC-II) indicate the top 25% affinity binding. Orange bars indicate high probability B-cell binding. Background shading shows membrane (green) extramembrane (yellow), intramembrane (pink).

[0102] FIG. 32: Comparative MHC II predicted binding and B cell epitope probability across 50 15-mer peptides with index positions of 280-329 in multiple flavivirus NS1 proteins.

[0103] FIG. 33: Envelope protein of Usutu virus, based on recent European isolates, using the Usutu Italian isolate, Accession number JF266698. A population permuted plot is shown in which predicted MHC-I (red line), MHC-II (blue line) binding, and probability of B cell binding (orange lines) for each peptide, arrayed N-C, for a permuted population comprising 63 human MHCs. Ribbons (Red=MHC-I, Blue-MHC-II) indicate the top 25% affinity binding. Orange bars indicate high probability B-cell binding. Background shading shows membrane (green) extramembrane (yellow), intramembrane (pink).

[0104] FIG. 34: PrM protein of Usutu virus, based on recent European isolates, using the Usutu Italian isolate, Accession number JF266698. A population permuted plot is shown in which predicted MHC-I (red line), MHC-II (blue line) binding, and probability of B cell binding (orange lines) for each peptide, arrayed N-C, for a permuted population comprising 63 human MHCs. Ribbons (Red=MHC-I, Blue-MHC-II) indicate the top 25% affinity binding. Orange bars indicate high probability B-cell binding. Background shading shows membrane (green) extramembrane (yellow), intramembrane (pink).

[0105] FIG. 35: Capsid protein of Usutu virus, based on recent European isolates, using the Usutu Italian isolate, Accession number JF266698. A population permuted plot is shown in which predicted MHC-I (red line), MHC-II (blue line) binding, and probability of B cell binding (orange lines) for each peptide, arrayed N-C, for a permuted population comprising 63 human MHCs. Ribbons (Red=MHC-I, Blue-MHC-II) indicate the top 25% affinity binding. Orange bars indicate high probability B-cell binding. Background shading shows membrane (green) extramembrane (yellow), intramembrane (pink).

[0106] FIG. 36: NS1 protein of Usutu virus, based on recent European isolates, using the Usutu Italian isolate, Accession number JF266698. A population permuted plot is shown in which predicted MHC-I (red line), MHC-II (blue line) binding, and probability of B cell binding (orange lines) for each peptide, arrayed N-C, for a permuted population comprising 63 human MHCs. Ribbons (Red=MHC-I, Blue-MHC-II) indicate the top 25% affinity binding. Orange bars indicate high probability B-cell binding. Background shading shows membrane (green) extramembrane (yellow), intramembrane (pink).

### DEFINITIONS

[0107] As used herein, the term “genome” refers to the genetic material (e.g., chromosomes) of an organism or a host cell.

[0108] As used herein, the term “proteome” refers to the entire set of proteins expressed by a genome, cell, tissue or organism. A “partial proteome” refers to a subset the entire set of proteins expressed by a genome, cell, tissue or organism. Examples of “partial proteomes” include, but are not limited to, transmembrane proteins, secreted proteins, and proteins with a membrane motif. Human proteome refers to all the proteins comprised in a human being. Multiple such sets of proteins have been sequenced and are accessible at the InterPro international repository (www.ebi.ac.uk/interpro). Human proteome is also understood to include those proteins and antigens thereof which may be over-expressed in certain pathologies, or expressed in a different isoforms in certain pathologies. Hence, as used herein, tumor associated antigens are considered part of the human proteome.

[0109] As used herein, the terms “protein,” “polypeptide,” and “peptide” refer to a molecule comprising amino acids joined via peptide bonds. In general “peptide” is used to refer to a sequence of 20 or less amino acids and “polypeptide” is used to refer to a sequence of greater than 20 amino acids.

[0110] As used herein, the term, “synthetic polypeptide,” “synthetic peptide” and “synthetic protein” refer to peptides, polypeptides, and proteins that are produced by a recombinant process (i.e., expression of exogenous nucleic acid encoding the peptide, polypeptide or protein in an organism, host cell, or cell-free system) or by chemical synthesis.

[0111] As used herein, the term “protein of interest” refers to a protein encoded by a nucleic acid of interest. It may be applied to any protein to which further analysis is applied or the properties of which are tested or examined. Similarly, as used herein, “target protein” may be used to describe a protein of interest that is subject to further analysis.

[0112] As used herein “peptidase” refers to an enzyme which cleaves a protein or peptide. The term peptidase may be used interchangeably with protease, proteinases, oligopeptidases, and proteolytic enzymes. Peptidases may be endopeptidases (endoproteases), or exopeptidases (exoproteases). Similarly, the term peptidase inhibitor may be used interchangeably with protease inhibitor or inhibitor of any of the other alternate terms for peptidase.

[0113] As used herein, the term “exopeptidase” refers to a peptidase that requires a free N-terminal amino group, C-terminal carboxyl group or both, and hydrolyses a bond not more than three residues from the terminus. The exopeptidases are further divided into aminopeptidases, carboxypeptidases, dipeptidyl-peptidases, peptidyl-dipeptidases, tripeptidyl-peptidases and dipeptidases.

[0114] As used herein, the term “endopeptidase” refers to a peptidase that hydrolyses internal, alpha-peptide bonds in a polypeptide chain, tending to act away from the N-terminus or C-terminus. Examples of endopeptidases are chymotrypsin, pepsin, papain and cathepsins. A very few endopeptidases act a fixed distance from one terminus of the substrate, an example being mitochondrial intermediate peptidase. Some endopeptidases act only on substrates smaller than proteins, and these are termed oligopeptidases. An example of an oligopeptidase is thimet oligopeptidase. Endopeptidases initiate the digestion of food proteins, generating new N- and C-termini that are substrates for the exopeptidases that complete the process. Endopeptidases also process proteins by limited proteolysis. Examples are the removal of signal peptides from secreted proteins (e.g. signal peptidase I,) and the maturation of precursor proteins (e.g. enteropeptidase, furin,). In the nomenclature of the Nomenclature Committee of the International Union of Biochemistry and Molecular Biology (NC-IUBMB) endopeptidases are allocated to sub-subclasses EC 3.4.21, EC 3.4.22, EC 3.4.23, EC 3.4.24 and EC 3.4.25 for serine-, cysteine-, aspartic-, metallo- and threonine-type endopeptidases, respectively. Endopeptidases of particular interest are the cathepsins, and especially cathepsin B, L and S known to be active in antigen presenting cells.

[0115] As used herein, the term “immunogen” refers to a molecule which stimulates a response from the adaptive immune system, which may include responses drawn from the group comprising an antibody response, a cytotoxic T cell response, a T helper response, and a T cell memory. An immunogen may stimulate an upregulation of the immune response with a resultant inflammatory response, or may result in down-regulation or immunosuppression. Thus, the T-cell response may be a T regulatory response. An immunogen also may stimulate a B-cell response and lead to an increase in antibody titer.

[0116] As used herein, the term “native” (or “wild type”) when used in reference to a protein refers to proteins encoded by the genome of a cell, tissue, or organism, other than one manipulated to produce synthetic proteins.

[0117] As used herein the term “epitope” refers to a peptide sequence which elicits an immune response, from either T cells or B cells or antibody.

[0118] As used herein, the term “B-cell epitope” refers to a polypeptide sequence that is recognized and bound by a B-cell receptor. A B-cell epitope may be a linear peptide or may comprise several discontinuous sequences which together are folded to form a structural epitope. Such component sequences which together make up a B-cell epitope are referred to herein as B-cell epitope sequences. Hence, a B-cell epitope may comprise one or more B-cell epitope sequences. Hence, a B cell epitope may comprise one or more B-cell epitope sequences. A linear B-cell epitope may comprise as few as 2-4 amino acids or more amino acids.

[0119] As used herein, the term “predicted B-cell epitope” refers to a polypeptide sequence that is predicted to bind to a B-cell receptor by a computer program, for example, as described in PCT US2011/029192, PCT US2012/055038, and US2014/014523, each of which is incorporated herein by reference, and in addition by Bepipred (Larsen, et al., Immunome Research 2:2, 2006.) and others as referenced by Larsen et al (ibid) (Hopp T et al PNAS 78:3824-3828, 1981; Parker J et al, Biochem. 25:5425-5432, 1986). A predicted B-cell epitope may refer to the identification of B-cell epitope sequences forming part of a structural B-cell epitope or to a complete B-cell epitope. In some usages herein B cell epitope is abbreviated to BEPI.

[0120] B cell epitopes are indicated in tables and graphics using an inverted scale in which most negative numbers are indicative of highest binding in standard deviation units. This is for convenience to allow graphics to be plotted containing MHC binding and BEPI probability.

[0121] As used herein, the term “T-cell epitope” refers to a polypeptide sequence which when bound to a major histocompatibility protein molecule provides a configuration recognized by a T-cell receptor. Typically, T-cell epitopes are presented bound to a MHC molecule on the surface of an antigen-presenting cell.

[0122] As used herein, the term “predicted T-cell epitope” refers to a polypeptide sequence that is predicted to bind to a major histocompatibility protein molecule by the neural network algorithms described herein, by other computerized methods, or as determined experimentally.

[0123] As used herein, the term “major histocompatibility complex (MHC)” refers to the MHC Class I and MHC Class II genes and the proteins encoded thereby. Molecules of the MHC bind small peptides and present them on the surface of cells for recognition by T-cell receptor-bearing T-cells. The MHC-Is both polygenic (there are several MHC class I and MHC class II genes) and polyallelic or polymorphic (there are multiple alleles of each gene). The terms MHC-1, MHC-II, MHC-1 and MHC-2 are variously used herein to indicate these classes of molecules. Included are both classical and nonclassical MHC molecules. An MHC molecule is made up of multiple chains (alpha and beta chains) which associate to form a molecule. The MHC molecule contains a cleft or groove which forms a binding site for peptides. Peptides bound in the cleft or groove may then be presented to T-cell receptors. The term “MHC binding region” refers to the groove region of the MHC molecule where peptide binding occurs.

[0124] As used herein, a “MHC II binding groove” refers to the structure of an MHC molecule that binds to a peptide. The peptide that binds to the MHC II binding groove may be from about 11 amino acids to about 23 amino acids in length, but typically comprises a 15-mer. The amino acid positions in the peptide that binds to the groove are numbered based on a central core of 9 amino acids numbered 1-9, and positions outside the 9 amino acid core numbered as negative (N terminal) or positive (C terminal). Hence, in a 15mer the amino acid binding positions are numbered from −3 to +3 or as follows: −3, −2, −1, 1, 2, 3, 4, 5, 6, 7, 8, 9, +1, +2, +3.

[0125] As used herein, the term “polypeptide sequence that binds to at least one major histocompatibility complex (MHC) binding region” refers to a polypeptide sequence that is recognized and bound by one or more particular MHC binding regions as predicted by the neural network algorithms described herein or as determined experimentally.

[0126] As used herein, the term “affinity” refers to a measure of the strength of binding between two members of a binding pair, for example, an antibody and an epitope and an epitope and a MHC-I or II haplotype. K_{d} is the dissociation constant and has units of molarity. The affinity constant is the inverse of the dissociation constant. An affinity constant is sometimes used as a generic term to describe this chemical entity. It is a direct measure of the energy of binding. The natural logarithm of K is linearly related to the Gibbs free energy of binding through the equation ΔG₀=−RT LN(K) where R=gas constant and temperature is in degrees Kelvin. Affinity may be determined experimentally, for example by surface plasmon resonance (SPR) using commercially available Biacore SPR units (GE Healthcare) or in silico by methods such as those described herein in detail. Affinity may also be expressed as the ic50 or inhibitory concentration 50, that concentration at which 50% of the peptide is displaced. Likewise ln(ic50) refers to the natural log of the ic50.

[0127] The term “K_{off}”, as used herein, is intended to refer to the off rate constant, for example, for dissociation of an antibody from the antibody/antigen complex, or for dissociation of an epitope from an MHC haplotype.

[0128] The term “K_{d}”, as used herein, is intended to refer to the dissociation constant (the reciprocal of the affinity constant “Ka”), for example, for a particular antibody-antigen interaction or interaction between an epitope and an MHC haplotype.

[0129] As used herein, the terms “strong binder” and “strong binding” and “High binder” and “high binding” or “high affinity” refer to a binding pair or describe a binding pair that have an affinity of greater than 2×10⁷M⁻¹ (equivalent to a dissociation constant of 50 nM Kd)

[0130] As used herein, the term “moderate binder” and “moderate binding” and “moderate affinity” refer to a binding pair or describe a binding pair that have an affinity of from 2×10⁷M⁻¹ to 2×10⁶M⁻¹.

[0131] As used herein, the terms “weak binder” and “weak binding” and “low affinity” refer to a binding pair or describe a binding pair that have an affinity of less than 2×10⁶M⁻¹ (equivalent to a dissociation constant of 500 nM Kd)

[0132] Binding affinity may also be expressed by the standard deviation from the mean binding found in the peptides making up a protein. Hence a binding affinity may be expressed as “−1σ” or ≤−1σ, where this refers to a binding affinity of 1 or more standard deviations below the mean. A common mathematical transformation used in statistical analysis is a process called standardization wherein the distribution is transformed from its standard units to standard deviation units where the distribution has a mean of zero and a variance (and standard deviation) of 1. Because each protein comprises unique distributions for the different MHC alleles standardization of the affinity data to zero mean and unit variance provides a numerical scale where different alleles and different proteins can be compared. Analysis of a wide range of experimental results suggest that a criterion of standard deviation units can be used to discriminate between potential immunological responses and non-responses. An affinity of 1 standard deviation below the mean was found to be a useful threshold in this regard and thus approximately 15% (16.2% to be exact) of the peptides found in any protein will fall into this category.

[0133] The terms “specific binding” or “specifically binding” when used in reference to the interaction of an antibody and a protein or peptide or an epitope and an MHC haplotype means that the interaction is dependent upon the presence of a particular structure (i.e., the antigenic determinant or epitope) on the protein; in other words, the antibody is recognizing and binding to a specific protein structure rather than to proteins in general. For example, if an antibody is specific for epitope “A,” the presence of a protein containing epitope A (or free, unlabeled A) in a reaction containing labeled “A” and the antibody will reduce the amount of labeled A bound to the antibody.

[0134] As used herein, the term “antigen binding protein” refers to proteins that bind to a specific antigen. “Antigen binding proteins” include, but are not limited to, immunoglobulins, including polyclonal, monoclonal, chimeric, single chain, and humanized antibodies, Fab fragments, F(ab′)2 fragments, and Fab expression libraries. Various procedures known in the art are used for the production of polyclonal antibodies. For the production of antibody, various host animals can be immunized by injection with the peptide corresponding to the desired epitope including but not limited to rabbits, mice, rats, sheep, goats, etc. Various adjuvants are used to increase the immunological response, depending on the host species, including but not limited to Freund's (complete and incomplete), mineral gels such as aluminum hydroxide, surface active substances such as lysolecithin, pluronic polyols, polyanions, peptides, oil emulsions, keyhole limpet hemocyanins, dinitrophenol, and potentially useful human adjuvants such as BCG (Bacille Calmette-Guerin) and Corynebacterium parvum.

[0135] For preparation of monoclonal antibodies, any technique that provides for the production of antibody molecules by continuous cell lines in culture may be used (See e.g., Harlow and Lane, Antibodies: A Laboratory Manual, Cold Spring Harbor Laboratory Press, Cold Spring Harbor, N.Y.). These include, but are not limited to, the hybridoma technique originally developed by Kohler and Milstein (Kohler and Milstein, Nature, 256:495-497 [1975]), as well as the trioma technique, the human B-cell hybridoma technique (See e.g., Kozbor et al., Immunol. Today, 4:72 [1983]), and the EBV-hybridoma technique to produce human monoclonal antibodies (Cole et al., in Monoclonal Antibodies and Cancer Therapy, Alan R Liss, Inc., pp. 77-96 [1985]). In other embodiments, suitable monoclonal antibodies, including recombinant chimeric monoclonal antibodies and chimeric monoclonal antibody fusion proteins are prepared as described herein.

[0136] According to the invention, techniques described for the production of single chain antibodies (U.S. Pat. No. 4,946,778; herein incorporated by reference) can be adapted to produce specific single chain antibodies as desired. An additional embodiment of the invention utilizes the techniques known in the art for the construction of Fab expression libraries (Huse et al., Science, 246:1275-1281 [1989]) to allow rapid and easy identification of monoclonal Fab fragments with the desired specificity.

[0137] Antibody fragments that contain the idiotype (antigen binding region) of the antibody molecule can be generated by known techniques. For example, such fragments include but are not limited to: the F(ab′)2 fragment that can be produced by pepsin digestion of an antibody molecule; the Fab′ fragments that can be generated by reducing the disulfide bridges of an F(ab′)2 fragment, and the Fab fragments that can be generated by treating an antibody molecule with papain and a reducing agent.

[0138] Genes encoding antigen-binding proteins can be isolated by methods known in the art. In the production of antibodies, screening for the desired antibody can be accomplished by techniques known in the art (e.g., radioimmunoassay, ELISA (enzyme-linked immunosorbant assay), “sandwich” immunoassays, immunoradiometric assays, gel diffusion precipitin reactions, immunodiffusion assays, in situ immunoassays (using colloidal gold, enzyme or radioisotope labels, for example), Western Blots, precipitation reactions, agglutination assays (e.g., gel agglutination assays, hemagglutination assays, etc.), complement fixation assays, immunofluorescence assays, protein A assays, and immunoelectrophoresis assays, etc.) etc.

[0139] As used herein “immunoglobulin” means the distinct antibody molecule secreted by a clonal line of B cells; hence when the term “100 immunoglobulins” is used it conveys the distinct products of 100 different B-cell clones and their lineages.

[0140] As used herein, the term “vector,” when used in relation to recombinant DNA technology, refers to any genetic element, such as a plasmid, phage, transposon, cosmid, chromosome, retrovirus, virion, etc., which is capable of replication when associated with the proper control elements and which can transfer gene sequences between cells. Thus, the term includes cloning and expression vehicles, as well as viral vectors.

[0141] As used herein, the term “vector” when used in relation to transmission of an arbovirus refers to the intermediate host of a virus, such as a mosquito or tick or other arthropod.

[0142] As used herein, the term “host cell” refers to any eukaryotic cell (e.g., mammalian cells, avian cells, amphibian cells, plant cells, fish cells, insect cells, yeast cells), and bacteria cells, and the like, whether located in vitro or in vivo (e.g., in a transgenic organism).

[0143] As used herein, the term “cell culture” refers to any in vitro culture of cells. Included within this term are continuous cell lines (e.g., with an immortal phenotype), primary cell cultures, finite cell lines (e.g., non-transformed cells), and any other cell population maintained in vitro, including oocytes and embryos.

[0144] The term “isolated” when used in relation to a nucleic acid, as in “an isolated oligonucleotide” refers to a nucleic acid sequence that is identified and separated from at least one contaminant nucleic acid with which it is ordinarily associated in its natural source. Isolated nucleic acids are nucleic acids present in a form or setting that is different from that in which they are found in nature. In contrast, non-isolated nucleic acids are nucleic acids such as DNA and RNA that are found in the state in which they exist in nature.

[0145] The terms “in operable combination,” “in operable order,” and “operably linked” as used herein refer to the linkage of nucleic acid sequences in such a manner that a nucleic acid molecule capable of directing the transcription of a given gene and/or the synthesis of a desired protein molecule is produced. The term also refers to the linkage of amino acid sequences in such a manner so that a functional protein is produced.

[0146] A “subject” is an animal such as vertebrate, preferably a mammal such as a human, or a bird, or a fish. Mammals are understood to include, but are not limited to, murines, simians, humans, bovines, ovines, cervids, equines, porcines, canines, felines etc.).

[0147] An “effective amount” is an amount sufficient to effect beneficial or desired results. An effective amount can be administered in one or more administrations,

[0148] As used herein, the term “purified” or “to purify” refers to the removal of undesired components from a sample. As used herein, the term “substantially purified” refers to molecules, either nucleic or amino acid sequences, that are removed from their natural environment, isolated or separated, and are at least 60% free, preferably 75% free, and most preferably 90% free from other components with which they are naturally associated. An “isolated polynucleotide” is therefore a substantially purified polynucleotide.

[0149] “Strain” as used herein in reference to a microorganism describes an isolate of a microorganism (e.g., bacteria, virus, fungus, parasite) considered to be of the same species but with a unique genome and, if nucleotide changes are non-synonymous, a unique proteome differing from other strains of the same organism. Typically strains may be the result of isolation from a different host or at a different location and time but multiple strains of the same organism may be isolated from the same host.

[0150] “Affinity maturation” is the molecular evolution that occurs during somatic hypermutation during which unique variable region sequences generated that are the best at targeting and neutralizing and antigen become clonally expanded and dominate the responding cell populations.

[0151] “uTOPE™ analysis” as used herein refers to the computer assisted processes for predicting binding of peptides to MHC and predicting cathepsin cleavage, described in PCT US2011/029192, PCT US2012/055038, and US2014/01452, each of which is incorporated herein by reference.

[0152] “Isoform” as used herein refers to different forms of a protein which differ in a small number of amino acids. The isoform may be a full length protein (i.e., by reference to a reference wild-type protein or isoform) or a modified form of a partial protein, i.e., be shorter in length than a reference wild-type protein or isoform.

[0153] “Immunostimulation” as used herein refers to the signaling that leads to activation of an immune response, whether said immune response is characterized by a recruitment of cells or the release of cytokines which lead to suppression of the immune response. Thus immunostimulation refers to both upregulation or down regulation.

[0154] “Up-regulation” as used herein refers to an immunostimulation which leads to cytokine release and cell recruitment tending to eliminate a non-self or exogenous epitope. Such responses include recruitment of T cells, including effectors such as cytotoxic T cells, and inflammation. In an adverse reaction upregulation may be directed to a self-epitope.

[0155] “Down regulation” as used herein refers to an immunostimulation which leads to cytokine release that tends to dampen or eliminate a cell response. In some instances such elimination may include apoptosis of the responding T cells.

[0156] “IGHV” as used herein is an abbreviation for immunoglobulin heavy chain variable regions

[0157] “IGLV” as used herein is an abbreviation for immunoglobulin light chain variable regions “Adverse immune response” as used herein may refer to (a) the induction of immunosuppression when the appropriate response is an active immune response to eliminate a pathogen or tumor or (b) the induction of an upregulated active immune response to a self-antigen or (c) an excessive up-regulation unbalanced by any suppression, as may occur for instance in an allergic response.

[0158] As used herein “epitope mimic” describes a peptide that is present and elicits an immune response in one protein (e.g., source protein) and the humoral and cellular effectors of that immune response then recognize and act upon the same peptide motif where it occurs in a different protein (e.g., target protein). For example, an antibody which is elicited by a B cell epitope in a microorganism and which binds to a B cell epitope peptide derived from a human protein would be said to have found an epitope mimic. Epitope mimics are those peptide motifs which have a high probability of being a B cell epitope both in the protein which elicits the antibody response and in the target protein to which said antibody binds. Peptides forming such B cell epitope mimics are typically in the top 25% of probability of being B cell epitopes within the protein. In some embodiments, epitope mimics are an important mechanism in autoimmunity. An “epitope mimic motif” as used herein is the amino acid motif comprising an epitope mimic. In some preferred cases the epitope mimic motif is a pentamer. An “epitope mimic sequence” as used herein is a nucleotide or amino acid sequence which comprises an epitope mimic.

[0159] As used herein “TCEM mimic” is used to describe a peptide which has an identical or overlapping TCEM, but may have a different GEM. Such a mimic occurring in one protein may induce an immune response directed towards another protein which carries the same TCEM motif. This may give rise to autoimmunity or inappropriate responses to the second protein.

[0160] “Anchor peptide”, as used herein, refers to peptides or polypeptides which allow binding to a substrate to facilitate purification or which facilitate attachment to a solid medium such as a bead or plastic dish or are capable of insertion into a membrane of a cell or liposome or virus like particle or other nanoparticle. Among the examples of anchor peptides are the following, which are considered non-limiting, his tags, immunoglobulins, Fc region of immunoglobulin, G coupled protein, receptor ligand, biotin, and FLAG tags. In some instances, an anchor peptide is designed to be cleavable following exposure to an endopeptidase in vitro or in vivo.

[0161] “Label peptide” as used herein refers to a peptide or polypeptide which provides, either directly or by a ligated residue, a colorimetric, fluorescent, radiation emitting, light emitting, metallic or radiopaque signal which can be used to identify the location of said peptide. Among the non-limiting examples of such label peptides are streptavidin, fluorescein, luciferase, gold, ferritin, tritium,

[0162] “MHC subunit chain” as used herein refers to the alpha and beta subunits of MHC molecules. A MHC II molecule is made up of an alpha chain which is constant among each of the DR, DP, and DQ variants and a beta chain which varies by allele. The MHC I molecule is made up of a constant beta macroglobulin and a variable MHC A, B or C chain.

[0163] As used herein an “immunostimulant” may refer to an adjuvant, including but not limited to Freunds adjuvant, inorganic compounds (e.g., alum, aluminum hydroxide, aluminum phosphate, calcium phosphate hydroxide), mineral oil (e.g., paraffin oil), bacterial products (e.g., killed bacteria, Bordetella pertussis, Mycobacterium bovis, toxoids), nonbacterial organics (e.g., squalene, thimerosal), detergents (e.g., Quil A), plant saponins from quillaja, soybean, polygala senega, cytokines (e.g., IL-1, IL-2, IL-12), and food Based oil (e.g., adjuvant 65).

[0164] A used herein the term “domain”, when used herein to describe the domains of flavivirus envelopes, refers to structural domains as characterized in crystal structures (e.g., crystal structures for tick borne encephalitis and Japanese encephalitis viruses [11, 12]).

[0165] “Neural and neurologic proteins,” as used herein, refers to proteins within the human proteome, which have been identified as having a function in the nervous system in development or function. Included among such proteins, but not limited to these examples, are those which have the term neural, neuron, neuronal, neurologic, neurotropic, neurotropin, neuropeptide, neurogenic, glial, synaptic, and neurite in their curation at Uniprot (www.uniprot.org). Proteins are described by their Uniprot identifies in the tables included herein. Glycoprotein M6A and Glial fibrillary acidic protein are also included herein. While described by use of the identifiers for human proteins the defined term is intended to also include close homologues from other species. In some embodiments, such proteins are those identified in a key word search of the complete Human proteome Uniprot curation by search for the terms “neur”, “synapt” and “glial” contained in their names. As used herein the term neural and neurologic proteins refers not only to mature processed forms of the proteins but also to precursor forms of said proteins, including but not limited to propeptide and prepropeptide forms.

[0166] “Microencephaly” and “microcephaly” as used herein describes a condition of fetuses and neonates in which part or all of the brain is absent and the cranium is reduced in size at birth.

[0167] “Guillain Barré syndrome,” abbreviated as GBS, as used herein refers to a complex of symptoms, which include peripheral neuropathy affecting motor, sensitive and autonomic nerves and spinal roots causing acute, or subacute, progressive motor weakness sometimes advancing to respiratory paralysis. GBS is an autoimmune disease and has been noted following various infections, including influenza, Campylobacter, dengue and Zika virus. Although symptomatology is shared, GBS may have various pathogeneses, with different immune responses directed to different self proteins.

[0168] “Flaviviruses” as used herein refers to the taxonomic group of viruses of that name [4]. Abbreviations are used for several flaviviruses including but not limited to Japanese encephalitis JEV or JAEV, West Nile Virus WNV, Tick Borne encephalitis TBEV, yellow fever YF, dengue DEN, Saint Louis encephalitis virus, SLE, hepatitis C HEPC, Usutu USUV, and Zika virus ZIKV

[0169] “Microbiocide” as used herein refers to a composition which may be a peptide, polypeptide or enzyme or small molecule which acts on a microorganism to inhibit its replication or cause lethal structural damage. Microbiocides include but are not limited to bactericides, virucides, and fungicides.

[0170] “Cytotoxin” or “cytocide” as used herein refers to a peptide or polypeptide which is toxic to cells and which causes cell death. Among the non-limiting examples of such polypeptides are RNAses, phospholipase, membrane active peptides such as cercropin, and diphtheria toxin. Cytotoxin also includes radionuclides which are cytotoxic such as alpha emitters or Auger particles.

[0171] “Cytokine” as used herein refers to a protein which is active in cell signaling and may include, among other examples, chemokines, interferons, interleukins, lymphokines, granulocyte colony-stimulating factor tumor necrosis factor and programmed death proteins.

[0172] As used herein the term “Alpha emitter” refers to a radioisotope which emits alpha radiation. Examples of alpha emitters which may be suitable for clinical use include, but are not limited to, Astatine-211, Bismuth-212, Bismuth-213, Actinium-225 Radium-223, Terbium-149, Fermium-255

[0173] As used herein “Auger particles” refers to the low energy electrons emitted by radionuclides such as but not limited to, Gadolinium-67, Technicium-99, Indium-111, Iodine-123, Iodine-125, Tellurium-201. Auger electrons are advantageous as they have a short path of transit through tissue.

[0174] As used herein a “scrambled peptide” or “scrambled mimic” refers to a peptide in which the amino acids have been exchanged in positions. Thus, ACDEF is an example of a scrambled peptide of FDCEA. A “scrambled peptide” or “scrambled mimic” also refers to a peptide in which an epitope mimic has been removed by substituting one or more amino acids.

[0175] As used herein the term “Zika fetal syndrome” refers to one or more abnormalities in a fetus borne by a mother infected by Zika virus, or in a child resulting from such a pregnancy. Zika fetal syndrome includes, but is not limited to, spontaneous abortion, fetal death, fetal growth retardation, amniotic insufficiency, microcephaly, optical lesions, and neurologic defects detected post partum.

[0176] As used herein the term “Neuropeptide Y” is used to refer to the full proneuropeptide of 69 amino acids as well as to the mature neuropeptide Y of 36 amino acids. Human neuropeptide Y is encoded as a prepropeptide comprising a signal peptide of 28 amino acids, a neuropeptide Y mature peptide of 36 amino acids, a 3 amino acid linker and a 30 amino acid carboxyterminal flanking peptide (CPON)[5]. In some embodiments, an epitope mimic for Zika is identified in the CPON component and for dengue 3 in the mature NPY component. In some embodiments the 3 amino acid cleavage sequence glycine-lysine-arginine is mutated to prevent cleavage and retain the full length 69 amino acid propeptide.

[0177] As used herein “microcephaly associated protein” refers to a protein which contains the term microcephaly in the UniProt description of its functions or pathological associations. Microcephaly associated proteins include but are not limited to proteins encoded by the following genes: MCPH1, Microcephalin, MCPH2, WDR62, MCPH3, CDK5RAP2, MCPH4, CASC5, MCPH5, ASPM, MCPH6, CENPJ, MCPH7, STIL, MCPH8, CEP135, MCPH9, CEP152, MCPH10, ZNF335, MCPH11, PHC1, MCPH12, and CDK6.

[0178] “Abnormal spindle like microcephaly associated protein” also known as “abnormal spindle like primary microcephaly protein” or “ASPM” refers to the protein designated as Uniprot Q8IZT6, and identified as having a role in mitotic spindle regulation.

[0179] As used herein the proteins comprising the polyprotein of Zika virus may be abbreviated as follows Capsid as “caps” or “C”, Propeptide membrane as “PrM”, envelope as “Env” or “E” and the nonstructural proteins as NS1, NS2A, NS2B, NS3, NS4A, NS4B, and NS5.

[0180] As used herein the term “pan flavivirus epitope” and “pan flavivirus antibody” refer to epitopes, and antibodies that are directed to them, which cross react between the serotypes of dengue, Zika and Yellow fever, and in some cases with other flaviviruses. These include but are not limited to epitopes located in the envelope protein fusion loop, in the region comprising amino acids DRGWGN.

[0181] As used herein the term “Antibody dependent enhancement” or “ADE” refers to the phenomenon described by Halstead et al [6, 7] in which sub-neutralizing antibodies aid in uptake of virus and thus increase the replication of virus leading to more severed disease. ADE appears to depend largely on pan flavivirus antibodies [8].

[0182] As used herein the term “malaria” refers to members of the apicomplexan genus Plasmodium, and in particular to those species which cause clinical disease in humans including but not limited to Plasmodium falciparum, P. vivax, P. malariae and P. ovale.

[0183] As used herein all designations of malaria protein identification follow the Plasmodium Genomics Resource at www.plasmoDB.org and correspond to the identities shown as of 5 Aug. 2016, at which time Release 28 was in effect.

[0184] As used herein “ADAMTS13” and “A disintegrin and metalloproteinase with thrombospondin motifs 13” are used interchangeably and refer to the protein described in UniProt as ATS13 at http://www.uniprot.org/uniprot/ATS13 HUMAN and as further described in comparison with other related disintegrin and metalloproteinases by Porter et al [17]

[0185] As used herein “cardiovascular function proteins” are those curated in UniProt to have a role in the cardiovascular system structure and function, in blood flow, clotting, hemorrhage or expressed in any vascular cell, endothelial cell, platelet, or erythrocyte. More particularly the proteins encompassed in this category are those which are curated because they include a key word included in Table 28.

[0186] The term “virus-like particle” as used herein, refers to a non-infective viral subunit either with, or without, viral proteins. For example, a virus-like particle may completely lack the DNA or RNA genome. Further, a virus-like particle comprising viral capsid proteins may undergo spontaneous self-assembly. Preparations of virus-like particles are contemplated in one embodiment, where the preparation is purified free of infectious virions (or at least substantially free, such that the preparation has insufficient numbers to be infectious). Thus, the term “virus-like particle” and “VLP” includes a non-replicating viral shell that resembles live virus in external conformation. Methods for producing and characterizing recombinantly produced VLPs have been described for VLPs from several viruses, including human papilloma virus type 1 (Hagnesee et al. (1991) J. Virol. 67:315), human papilloma virus type 16 (Kirnbauer et al. Proc. Natl. Acad. Sci. (1992) 89:12180), HIV-1 (Haffer et al., (1990) J. Virol. 64:2653), and hepatitis A (Winokur (1991) 65:5029). Additional methods for expressing VLPs that contain Newcastle Disease virus proteins are provided by Pantua et al. (2006) J. Virol. 80:11062-11073.

### DESCRIPTION OF THE INVENTION

[0187] Zika virus is a flavivirus, first isolated in the Zika forest of Uganda in 1947 [18]. It is closely related to Spondewi virus, dengue, yellow fever, Japanese encephalitis virus, tick borne encephalitis virus, and West Nile virus [13]. In endemic areas, the Zika virus is transmitted by several species of Aedes mosquitoes, most particularly by Aedes aegpti and Aedes albopictus [18, 19]. Traditionally endemic in Africa and South East Asia [18], the Zika virus was isolated in French Polynesia in 2013 and 2014, where it was observed to be associated with cases of neonatal microencephaly and with Guillain Barré syndrome (GBS) [20]. In 2014 or late 2015 Zika virus was introduced into Brazil, a country where it had not previously been reported and where the population was fully naïve to infection [21]. It has since spread to most of Central and northern South America and the Caribbean (Centers for Disease Control and Prevention. Zika Virus, For Health Care Providers: Clinical Evaluation & Disease. 2015 Available from: http://www.cdc.gov/zika/hc-providers/clinicalevaluation.html. In August, 2016 autochthonous spread of Zika was confirmed in Florida and has now also been detected in Texas.

[0188] Primary Zika infection in healthy individuals is a minor disease causing a rash and fever of few days duration, with no deaths reported [1]. When Zika infects pregnant women in the first or second trimester, from 6-25% of live births are of microencephalitic infants [22, 23]. In addition, a rapid rise in the number of GBS cases has occurred the epidemic area, in some areas with a high mortality reported [24, 25]. While other flaviviruses are neurotropic, especially WNV, JEV, and TBEV, microencephaly and GBS are not reported following infection by these viruses. GBS has been reported sporadically following dengue infection [26]. While the introduction of Zika virus into an immunologically naïve population may well result in clinical signs that differ from those in endemic areas, there has been no clear explanation for the pathogenesis observed. Microencephaly is reported in other viral infections such as cytomegalovirus and rubella, but not for other flavivirus infections.

[0189] A particular puzzle has been why cases of severe Zika disease emerged as the virus spread outside the endemic zone of Africa and Southeast Asia, where the virus has been recognized for decades with no reports of microcephaly or GBS. These complications first appeared in French Polynesia. Microcephaly, encephalitis, and GBS have been reported in Martinique [27, 28]. Many reports of clinical Zika disease have come from patients returning home to northern countries (Europe, US etc.) from visits to endemic countries. In Brazil, severe Zika disease, and in particular microcephaly, has been clustered in the Northeastern part of the country [29] In one study an effort was made to pattern the distribution of Zika in Brazil relative to the inverse of where most intensive yellow fever vaccination has taken place [30].

[0190] Clearly there is a compelling and urgent need for development of interventions and diagnostics for ZIKV. This must be done however in the light of understanding of the pathogenesis of Zika associated neurologic symptoms and microcephaly.

[0191] Dengue is a major and rapidly expanding public health challenge in tropical and subtropical areas, responsible for hundreds of millions of infections and approaching 100 million clinical cases worldwide each year [31]. Caused by four closely related serotypes of flavivirus, it is a second infection with a different serotype which leads to the most severe cases of dengue, dengue hemorrhagic fever [8, 15]. Severe dengue and dengue hemorrhagic fever (DHF) is characterized by spontaneous hemorrhage, increased vascular permeability, hematuria and thrombocytopenia [5]. The severity of second infections has been attributed to the phenomenon of antibody dependent enhancement (ADE) in which prior antibody, which is not neutralizing, facilitates uptake of virus and enhances virus titer [3, 15]. The primary epitope conserved across all dengue envelope proteins is in the domain II of envelope protein, in the region known as the fusion loop [4]. While ADE undoubtedly contributes to the severity of dengue, it may not be the only factor. Recent studies of NS1, a non-structural protein which is shed into the extracellular space in large amounts in dengue, show that NS1 levels are a predictor of dengue severity [32] and that this may relate to the role of NS1 in focusing virus assembly [6, 7]. A puzzling aspect remains, which is that the severity of DHF peaks days after NS1 levels have diminished [8], indicating that other NS1 related factors may be in play.

[0192] Usutu virus (USUV) is another emerging flavivirus, first identified in South Africa in 1959, but recently associated with clinical cases in southern Europe [9], and now considered a threat to Latin America [10]. While not associated with major disease outbreaks in endemic areas, Usutu virus has been linked to fever, rash, and meningioencephalitis [9]. This pattern of clinical signs may change as Usutu virus moves into new geographic areas and populations not previously exposed.

[0193] Clearly there is a compelling and urgent need for development of preventive and therapeutic interventions and diagnostics for the emerging flaviviruses. The present invention builds on immunoinformatic analyses which have identified autoimmune pathogenesis, and which identify key epitopes and, hence, provide compositions and methods for design of countermeasures and diagnostics for dengue, Zika, and Usutu virus.

[0194] In the present invention, immunoinformatic analysis of B cell binding, MHC binding, cathepsin cleavage patterns, and T cell motifs as described previously (PCT US2011/029192, PCT US2012/055038, and US2014/01452, and U.S. Provisional Appl. 62/306,262 (each of which is incorporated herein by reference in its entirety) was used to arrive at a characterization of the immunologic characteristics of the Zika virus proteins. Examples of some of the output of such analysis for ZIKV are shown in FIGS. 1-3 (envelope, capsid and pre-membrane). Structurally, the envelope of ZIKV is very similar to other flaviviruses, based on comparison of maps of epitopes (FIG. 4). However, the amino acid sequence of Zika is quite different from that of other flaviviruses, sharing only one area of conservation, and likely antibody cross reactivity, in domain II.

[0195] By such epitope mapping approaches, the present invention describes the identification of those epitopes within the structural proteins of ZIKV which are likely to be cross reactive with other flaviviruses, and those which are specific to ZIKV. The association of B cell epitopes with MHC binding leading to effective T cell help is described, identifying epitopes most likely to yield high titers of antibody. Comparison of such mapping applied to Zika isolates from around the world allowed the demonstration that Zika envelope proteins have largely been conserved in sequence, but differ significantly from other flaviviruses. By extraction of B cell epitope motifs, we then compared pentamer peptides comprising B cell epitopes to pentamers in the entire human proteome, by reference to a database of epitope motifs we established previously (see, e.g., WO 2014/200910; herein incorporated by reference in its entirety). This enabled identification of matches to pentamers in the proteomes. These were then curated to identify proteins with neurologic function. From this shortlist, human proteins were also analyzed to identify B cell epitopes which would cross react with ZIKV antibodies. Other flaviviruses were compared to identify mimics unique to ZIKV, and in the case of dengue a mimic which may also be associated with GBS in dengue type 3.

[0196] Epitope mimics were identified in a number of areas in the ZIKV structural proteins. Domain III of the ZIKV protein contains a particularly critical motif which is unique, structurally exposed to antibodies, and which is associated with high MHC binding likely to result in high antibody titers. This epitope pentamer is homologous to a B cell epitope in neuropeptide Y (UniProtKB-P01303 (NPY_HUMAN)). Stimulation of high titers of antibody which bind/complex this neuropeptide at a critical stage of fetal development is consistent with the failure of brain development observed in the ZIKV affected infants and with the retinal lesions described in affected infants [33]. Antibodies cross the placenta and in first and second trimester can enter the developing brain in the absence of a fully formed blood brain barrier [34]. While exposure may only be for a few days or weeks and while fetal immunoglobulins may only reflect 10% of maternal titer [34], exposure at a critical time window is likely sufficient to affect cerebral development. There is precedent for this mode of intrauterine immunoglobulin mediated pathology [35, 36].

[0197] Primary infection with ZIKV is a minor febrile disease with a rash. However, GBS may arise after primary Zika infection. Antibodies to Zika at high titers, specific to the epitope mimic in Domain II that matched NPY, and which bind NPY could progressively deplete this protein, until such time as the antibody wanes and ongoing NPY production exceeds its depletion. This is consistent with the transient nature of GBS. GBS is a broad autoimmune syndrome with many causal mechanisms described, including autoimmune reactions with myelin and but also antibody interactions with gangliosides. Interestingly GBS has been reported occasionally following dengue. Dengue 3 shares a mimic with NPY, although this motif GEDAP is not found in Zika virus. However, the B cell epitope in DEN3 envelope protein lacks MHC II binding except for a few alleles, possibly accounting for the sporadic occurrence of GBS.

[0198] In this invention, we describe other mimics occurring in Zika virus which match other neural function proteins that may also play a role in pathogenesis. With the understanding that the pathogenesis of ZIKV neurologic effects, in particular GBS, are autoimmune and may arise from epitope mimics in the ZIKV proteins, it becomes imperative to design vaccines and therapeutics with this in mind. Failure to do so may result in further exacerbation of the disease pathogenesis.

[0199] ADE is of concern for all flaviviruses. Most ADE arises from non-neutralizing antibodies reactive with epitopes in the fusion loop Domain II of the envelope protein [4] and to a lesser extent antibodies reactive with PrM proteins [15]. As the Domain II epitope of dengue is shared with ZIKV and USUV, ADE may occur in sequential infections of one of these viruses before or after dengue [37], as it is in sequential infections with different serotypes of dengue.

[0200] In the case of Zika virus, a particular concern is that transplacental transfer of antibody is enabled by binding to the FcRn receptors on the placenta. In an embodiment of the present invention therefore it is particularly desirable to engineer an antibody devoid of Fc region to prevent or mitigate transplacental transfer.

[0201] While ADE undoubtedly contributes to the severity of flavivirus infections, it may not be the only factor. In the present invention, we address cardiovascular manifestations of Zika infection, as well as dengue and Usutu infections. Infection with Zika virus has led to the development of deadly thrombocytopenia. [38, 39]. In even mild cases of ZIKV, USUV, or dengue infection, an erythremic rash is a typical clinical sign. Dengue is well known as a hemorrhagic disease, with dengue hemorrhagic fever occurring most typically following a second infection with a different serotype from the first infection. While for many years the role of ADE has been cited as a cause for this [15], there is increasing evidence that dengue does evoke an autoimmune response [40], that von Willebrand factor may be depleted [41], and that other clotting factors may be affected [42, 43]. Most recently the NS1 protein has been implicated as leading to vascular permeability in dengue [6, 7] and activating Toll receptor 4, and several possible direct viral pathogenic mechanisms have been described. However, the most serious vascular leakage in dengue hemorrhagic fever occurs after the peak of NS1 has declined, suggesting that a direct role of NS1 may not be the only factor [8]. In particular embodiments of the present invention, a subset of the human proteome was selected to include those proteins which have a function in the cardiovascular system, including structural proteins found in endothelium, platelets, erythrocytes, and enzymes expressed by these cells, and coagulation cascade proteins. In the present invention, we describe the role of NS1 in dengue in eliciting auto antibodies to various proteins with cardiovascular function, including but not limited to coagulation factor V and VIII, prothrombin, von Willebrand factor, ADAMTS13 (A disintegrin and metalloproteinase with thrombospondin motifs 13), platelet glycoprotein Ib beta, vascular endothelial growth factor, vascular endothelial growth factor receptor and platelet endothelial aggregation receptor. Notably no such epitope matches in cardiovascular function proteins clearly linked to hemorrhage and thrombocytopenia occur in the corresponding proteins of West Nile virus. In particular embodiments we describe the precise B cell epitopes which are mimics, thereby enabling the mutation or removal of such epitopes to reduce adverse effects in a vaccine.

[0202] A number of human proteins have been identified as having an association with microcephaly, for instance when this occurs as an autosomal recessive familial trait [44]. In another embodiment of the present invention, we therefore also examined whether antibodies arising from flavivirus infection, and in particular ZIKV, may bind to epitope mimics in the microcephaly associated proteins. As a linear B cell epitope is a charged and protruding or exposed peptide sequence, identification of a B cell linear epitope also identifies peptides which are probable candidates as other ligand binders. Thus, while identifying epitope mimics in the virus, as defined, the same process also identifies virus peptides which may be bound by other ligands which would otherwise bind with a human protein. Essentially the virus peptide becomes a competitor in binding and may thus disrupt a human-human protein binding reaction. The present invention identifies a number of epitope mimics shared between ZIKV and human microcephaly associated proteins. It thus shows the possibility of virus peptides which compete with microcephaly associated proteins for binding of ligands, including but not limited to antibody.

[0203] Accordingly, the present invention provides peptides, polypeptides and proteins, and nucleic acids sequences encoding the peptides, polypeptides and proteins as described in SEQ ID NOs: 1 to 1256. The sequences of the peptide, polypeptides, proteins and nucleic acids of the present invention are included in the accompanying Sequence ID listing. It will be understood to a person of skill in that the present invention encompasses the listed sequences as well as portions of the listed sequences. For example, in some cases, the listed sequences contain a polypeptide of interest (e.g., a viral or human sequence) in association with exogenous sequences such as signal peptide sequences and linker sequences. In these instances, it will be understood that the invention by defined by designated the portion of the sequence that is the viral polypeptide sequence in isolation from the associated exogenous sequences. The invention may also be defined by describing the viral polypeptide sequence in association with one or more of the exogenous sequences. For example, the invention may be defined by specifically designating a particular range of amino acids or nucleotides from the listed sequence corresponding to the polypeptide of interest or to the polypeptide of interest and one or more of the associated exogenous or flanking sequences.

[0204] For example, in some embodiments, the present invention provides a synthetic Zika virus polypeptide comprising one or more B cell epitopes and one or more peptides that each bind with high affinity to three or more different MHC II molecules. In some embodiments, the polypeptide comprises B cell epitopes that are unique to Zika virus and do not elicit antibodies which cross react with a dengue virus. In some embodiments, the polypeptide comprises one or more altered or deleted epitope mimic sequences so that the sequence of the synthetic Zika virus polypeptide is altered in comparison to the corresponding wild type Zika virus polypeptide (e.g., the polypeptide comprising one or more altered or deleted epitope mimic sequences comprises a deletion or substitution mutation of one or more amino acids in the epitope mimic sequence so that the sequence of synthetic Zika virus polypeptide is altered in comparison to the corresponding wild type Zika virus polypeptide). In some embodiments, the epitope mimic sequence is found in a human neurologic protein (e.g., a human neurologic protein listed in tables 1, 6, 7, 8 or 9). In some embodiments, the epitope mimic sequences are selected from, for example, SEQ ID NOs: 1-34, 78-140, or 255-256. In some embodiments, the synthetic polypeptide comprises a Zika virus immunogen from an envelope polypeptide of Zika virus (e.g., Zika virus Domain I, Domain II, or Domain m polypeptides). In some embodiments, the Zika virus immunogen is an immunogen encoded by an amino acid sequence selected from, for example, amino acids 38-444 of SEQ ID NO: 142, amino acids 38-143 of SEQ ID NO: 144, amino acids 38-125 of SEQ ID NO: 146, amino acids 38-113 of SEQ ID NO: 148, amino acids 24-429 of SEQ ID NO: 150, amino acids 24-128 of SEQ ID NO: 152, amino acids 24-110 of SEQ ID NO: 154, amino acids 24-98 of SEQ ID NO: 156, amino acids 30-435 of SEQ ID NO: 158, amino acids 30-134 of SEQ ID NO: 160, amino acids 30-116 of SEQ ID NO: 162, amino acids 30-104 of SEQ ID NO: 164, amino acids 38-143 of SEQ ID NO: 166, amino acids 24-128 of SEQ ID NO: 168, amino acids 30-134 of SEQ ID NO: 170, or amino acids 38-444 of SEQ ID NO: 254. In some embodiments, the epitope mimic sequence is found in a human microcephaly associated protein (e.g., CDKRAP2, ASPM, or CEP135). In some embodiments, the epitope mimic sequence is selected from the group of epitope mimic sequences identified by SEQ ID NOs: 452-456. In some embodiments, the synthetic polypeptide comprises a Zika virus immunogen from a Zika virus protein selected from PrM, NS1, NS3, or NS4B. In some embodiments, the Zika virus immunogen is an NS1 immunogen encoded by an amino acid sequence selected from, for example, amino acids 21 to 384 of SEQ ID NO:441, amino acids 21 to 213 of SEQ ID NO:443 or amino acids 21 to 213 of SEQ ID NO:445.

[0205] Further embodiments provide a synthetic flavivirus NS1 polypeptide comprising one or more B cell epitopes and that comprise peptides that bind with high affinity to three or more different MHC II molecules. In some embodiments, the polypeptide is selected from, for example, a dengue virus NS1 polypeptide, Zika virus NS1 polypeptide, West Nile virus NS1 polypeptide, Yellow fever virus NS1 polypeptide, Usutu virus NS1 polypeptide, Japanese encephalitis virus NS1 polypeptide, Tickborne encephalitis virus NS1 polypeptide, or St Louis encephalitis virus NS1 polypeptide. In some embodiments, the polypeptide comprises one or more altered or deleted epitope mimic sequences so that the sequence of the synthetic polypeptide is altered in comparison to the corresponding wild type virus polypeptide. In some embodiments, the polypeptide comprising one or more altered or deleted epitope mimic sequences comprises a deletion or substitution mutation of one or more amino acids in the epitope mimic sequence so that the sequence of the synthetic virus polypeptide is altered in comparison to the corresponding wild type virus polypeptide. In some embodiments, the epitope mimic sequence matches an epitope motif in a human cardiovascular protein (e.g., a human protein expressed in vascular endothelium or in platelets). In some embodiments, the human cardiovascular protein is selected from, for example, ADAMTS13, Coagulation factor V, Coagulation factor VIII, Plasminogen, Platelet glycoprotein Ib beta chain, Vascular endothelial growth factor A, Vascular endothelial growth factor B, Vascular endothelial growth factor receptor 1, Vascular endothelial growth factor receptor 2, von Willebrand factor or Platelet endothelial aggregation receptor 1. In some embodiments, the epitope mimic sequences are selected from the group of epitope mimic sequences identified by SEQ ID NOs: 1106-1123. In some embodiments, the epitope mimic sequence matches an epitope motif in a human protein with neurologic function. In some embodiments, the epitope mimic sequences are selected from, for example, SEQ ID NOs:1124-1125 and 1138-1149. In some embodiments, the synthetic polypeptide comprises Zika PrM and Env proteins in operable linkage. In some embodiments, the polypeptide is encoded by amino acids 25 to 603 of SEQ ID NO:258, amino acids 25 to 603 of SEQ ID NO:260, or amino acids 25 to 603 of SEQ ID NO:262. In some embodiments, the synthetic polypeptide comprises one or more altered or deleted pan-flavivirus epitopes so that the sequence of the synthetic Zika virus polypeptide is altered in comparison to the corresponding wild type Zika virus polypeptide. In some embodiments, the pan-flavivirus epitope is DRGWG (SEQ ID NO:554).

[0206] Further embodiments provide a fusion protein comprising the synthetic polypeptides described herein. In some embodiments, the fusion protein comprises a peptide sequence selected from a signal sequence, a linker sequence, a purification tag sequence and an immunoglobulin sequence in operable association with the synthetic polypeptide. In some embodiments, the peptide sequence is exogenous to the synthetic polypeptide sequence. In some embodiments, the immunoglobulin sequence is a constant region sequence.

[0207] In other embodiments, the present invention provides a synthetic human neurological polypeptide comprising one or more altered or deleted epitope mimic sequences so that the sequence of the synthetic neurological polypeptide is altered in comparison to the corresponding wild type neurological polypeptide and wherein the epitope mimic sequence is shared with a B cell epitope in a Zika virus or dengue virus. In some embodiments, the polypeptide comprising one or more altered or deleted epitope mimic sequences comprises a deletion or substitution mutation of one or more amino acids in the epitope mimic sequence so that the sequence of synthetic neurological polypeptide is altered in comparison to the corresponding wild type neurological polypeptide. In some embodiments, the human neurological polypeptide is proneuropeptide Y or neuron navigator 2. In some embodiments, the polypeptide comprises an amino acid sequence selected from, for example, amino acids 35-104 of SEQ ID NO: 174, amino acids 35-104 of SEQ ID NO: 176, amino acids 35-104 of SEQ ID NO: 178, amino acids 35-104 of SEQ ID NO: 180, amino acids 35-104 of SEQ ID NO:182, amino acids 30-270 of SEQ ID NO:236, amino acids 30-270 of SEQ ID NO:238, amino acids 30-270 of SEQ ID NO:240, amino acids 30-270 of SEQ ID NO:242, amino acids 30-280 of SEQ ID NO:244, amino acids 30 to 269 of SEQ ID NO.: 399, amino acids 30 to 269 of SEQ ID NO.:401, amino acids 30 to 269 of SEQ ID NO.:403, amino acids 30 to 269 of SEQ ID NO.:405, amino acids 30 to 279 of SEQ ID NO.:407, amino acids 268 to 507 of SEQ ID NO.:409, amino acids 268 to 507 of SEQ ID NO.:411, amino acids 268 to 507 of SEQ ID NO.:413, amino acids 268 to 507 of SEQ ID NO.:415, amino acids 268 to 507 of SEQ ID NO.:417, amino acids 30 to 100 of SEQ ID NO.:419, amino acids 30 to 100 of SEQ ID NO.:421, amino acids 30 to 100 of SEQ ID NO.:423, amino acids 30 to 100 of SEQ ID NO.:425, amino acids 30 to 110 of SEQ ID NO.:427, amino acids 268 to 338 of SEQ ID NO.:429, amino acids 268 to 338 of SEQ ID NO.:431, amino acids 268 to 338 of SEQ ID NO.:433, amino acids 268 to 338 of SEQ ID NO.:435, or amino acids 268 to 348 of SEQ ID NO.:437.

[0208] Other embodiments provide a synthetic polypeptide derived from a human microcephaly associated protein comprising one or more altered or deleted epitope mimic sequences so that the sequence of the synthetic polypeptide is altered in comparison to the corresponding wild type human microcephaly associated protein and wherein the epitope mimic sequence is shared with a B cell epitope in a Zika virus or dengue virus. In some embodiments, the polypeptide comprising one or more altered or deleted epitope mimic sequences comprises a deletion or substitution mutation of one or more amino acids in the epitope mimic sequence so that the sequence of synthetic polypeptide is altered in comparison to the corresponding wild type human microcephaly associated protein (e.g., ASPM).

[0209] As described above, in some preferred embodiments, the present invention provides synthetic or variant viral or human polypeptide sequences (or the corresponding nucleic acid sequences) that have a mutation such as a substitution mutation or deletion mutation in one or more epitope mimic sequences. In some embodiments, the mutation is a deletion mutation that removes all or part of the epitope mimic so that the polypeptide does not cross react with antibodies specific for the wild type epitope mimic. In some embodiments, the mutation is a substitution mutation or insertion mutation that alters the epitope mimic so that the polypeptide does not cross react with antibodies specific for the wild type epitope mimic. Thus, the sequences of the present invention may be described by reference to the wild type viral or human sequence and then specifying that a particular epitope mimic sequence (or sequences) in the wild type sequence is mutated to alter or delete the specified epitope mimic sequence. Those of skill in the art will recognize that there are a number of different ways the epitope mimic sequence may be altered or deleted by mutation and will recognize that the identity of the specified sequence may readily be determined by reference to the corresponding wild type sequence.

[0210] In some embodiments, a peptide or polypeptide sequence (e.g., an epitope mimic sequence, altered epitope mimic sequence, or in some preferred embodiments a pentamer or other peptide sequence defined in the tables in the examples) of the present invention includes a flanking sequence extending beyond the region comprising the identified peptide. The flanking sequence may be included on either or both of the C and/or N terminals of the peptide and may be a native or wild type flanking sequence or a flanking sequence that is exogenous to the peptide (i.e., a flanking sequence that does not naturally occur with the peptide). Such a flanking sequence may be used in assuring a synthetic version of the peptide is displayed in such a way as to represent the topological arrangement in its native state. For instance, inclusion of a flanking sequence at each end and inclusion of a cysteine residue may be used to ensure a peptide is displayed on a loop. Flanking sequences may be included to allow multiple peptides to be arranged together to epitopes that occur adjacent to each other in a native protein. A flanking sequence may be used to facilitate expression as a fusion polypeptide, for instance linked to an immunoglobulin Fc region to ensure secretion. In such embodiments where flanking regions are included said flanking regions may comprise from 1-20, from 1-50, from 10-20, 20-30 or 40-50, or up to 100 amino acids on either or both of the N terminal end or the C terminal end of the epitope polypeptide. In some embodiments, these peptides and polypeptides find use as capture reagents in the diagnostic assays below, or find use a components of vaccines such as subunit vaccines.

[0211] In some embodiments, the present invention provides sequences that are homologous or variants of the sequences described above. It will be recognized that the sequences described above can be altered, for example by substituting one or more amino acids in the sequences with a different amino acid. The substitutions may be made in the listed sequence or in the flanking regions. Such mutated or variant sequences are within the scope of the invention. It will further be recognized by those of skill in the art that where the sequence is identified as having an altered or deleted epitope mimic sequence, that the defined sequence may include mutations in other portions of the defined sequence. These sequences may be described by defining the sequence as having a particular identity or homology to the defined sequence, with the proviso that that the mutations that the alterations or deletions of the defined epitope mimic sequence are retained. In other words, where for example, the sequence is defined as having 95% identity or homology or some other percent identity or homology to a defined sequence having an altered epitope mimic sequence, it will be understood to a person of ordinary skill in the art that the sequence retains the alterations to the defined epitope mimic sequence so that the function of the defined epitope mimic sequence is not destroyed (i.e., the the altered sequence does not bind to antibodies specific for the wild type epitope mimic sequence or the epitope mimic sequence is removed from the viral polypeptide) while having additional variations in the other portions of the sequence so that identity or homology to the defined sequence is at least 95% or some other other percent identity.

[0212] The substitutions may be conservative or non-conservative. Accordingly, in some embodiments, the present invention provides polypeptide sequences that share at least 70%, 75%, 80%, 85%, 90%, 95%, 96%, 97%, 98%, or 99% identity with the listed sequence, relative to the epitope portion of the listed sequences (e.g., excluding non-epitope sequences). In some embodiments, variant sequences retain the epitope of the recited sequence. In some embodiments, the variant sequences have about 1, 2, 3, 4, 5, 6, 7, 8, 9 or 10 amino acid substitutions, or a range of substitutions from about 1 to about 10 substitutions, for example 1-4 substitutions, 2-4 substitutions, 3-5 substitutions, 5-10 substitutions, etc. The substitutions may be conservative or non-conservative.

[0213] As used herein, a “conservative” amino acid substitution refers to the substitution of an amino acid in a peptide or polypeptide with another amino acid having similar chemical properties, such as size or charge. For purposes of the present disclosure, each of the following eight groups contains amino acids that are conservative substitutions for one another:
[0214] 1) Alanine (A) and Glycine (G);
[0215] 2) Aspartic acid (D) and Glutamic acid (E);
[0216] 3) Asparagine (N) and Glutamine (Q);
[0217] 4) Arginine (R) and Lysine (K);
[0218] 5) Isoleucine (I), Leucine (L), Methionine (M), and Valine (V);
[0219] 6) Phenylalanine (F), Tyrosine (Y), and Tryptophan (W);
[0220] 7) Serine (S) and Threonine (T); and
[0221] 8) Cysteine (C) and Methionine (M).

[0222] Naturally occurring residues may be divided into classes based on common side chain properties, for example: polar positive (histidine (H), lysine (K), and arginine (R)); polar negative (aspartic acid (D), glutamic acid (E)); polar neutral (serine (S), threonine (T), asparagine (N), glutamine (Q)); non-polar aliphatic (alanine (A), valine (V), leucine (L), isoleucine (I), methionine (M)); non-polar aromatic (phenylalanine (F), tyrosine (Y), tryptophan (W)); proline and glycine; and cysteine. As used herein, a “semi-conservative” amino acid substitution refers to the substitution of an amino acid in a peptide or polypeptide with another amino acid within the same class.

[0223] In some embodiments, unless otherwise specified, a conservative or semi-conservative amino acid substitution may also encompass non-naturally occurring amino acid residues that have similar chemical properties to the natural reside. These non-natural residues are typically incorporated by chemical peptide synthesis rather than by synthesis in biological systems. These include, but are not limited to, peptidomimetics and other reversed or inverted forms of amino acid moieties. Embodiments herein may, in some embodiments, be limited to natural amino acids, non-natural amino acids, and/or amino acid analogs.

[0224] Non-conservative substitutions may involve the exchange of a member of one class for a member from another class.

[0225] The present invention therefore embodies a number of embodiments that enable the development of safe and effective diagnostic, research, and medical interventions.

[0226] Vectors and Recombinant Expression:

[0227] In some embodiments, the present invention provides vectors and recombinant expression systems for expressing peptides and constructs described herein. The present invention is not limited to particular expression vectors. Exemplary vectors and expression methods are described herein.

[0228] In some embodiments, peptides are expressed using any suitable vector and expression system. In some embodiments, peptides are expressed in bacterial or eukaryotic expression vectors (e.g., commercially available vectors). In some embodiments, peptides are expressed in retroviral (e.g., adeno, adeno-associated, or lenti-viral vectors). Suitable vectors are introduced into suitable host cells (e.g., bacterial or eukaryotic host cells), expression is induced, and peptides are isolated using any suitable method.

[0229] The peptides, polypeptides, and proteins of the present invention may be produced by recombinant techniques. Thus, for example, a polynucleotide encoding a peptide, polypeptide or protein of the present invention may be included in any one of a variety of expression vectors for expressing a polypeptide. In some embodiments of the present invention, vectors include, but are not limited to, chromosomal, nonchromosomal and synthetic DNA sequences (e.g., derivatives of SV40, bacterial plasmids, phage DNA; baculovirus, yeast plasmids, vectors derived from combinations of plasmids and phage DNA, retroviral vectors and viral DNA such as vaccinia, adenovirus, fowl pox virus, and pseudorabies). It is contemplated that any vector may be used as long as it is replicable and viable in the host.

[0230] In particular, some embodiments of the present invention provide recombinant constructs comprising one or more of the sequences as broadly described above. In some embodiments of the present invention, the constructs comprise a vector, such as a plasmid or viral vector, into which a sequence of the invention has been inserted, in a forward or reverse orientation. In still other embodiments, the heterologous structural sequence is assembled in appropriate phase with translation initiation and termination sequences. In preferred embodiments of the present invention, the appropriate DNA sequence is inserted into the vector using any of a variety of procedures. In general, the DNA sequence is inserted into an appropriate restriction endonuclease site(s) by procedures known in the art.

[0231] Large numbers of suitable vectors are known to those of skill in the art, and are commercially available. Such vectors include, but are not limited to, the following vectors: 1) Bacterial—pQE70, pQE60, pQE-9 (Qiagen), pBS, pD10, phagescript, psiX174, pbluescript SK, pBSKS, pNH8A, pNH16a, pNH18A, pNH46A (Stratagene); ptrc99a, pKK223-3, pKK233-3, pDR540, pRIT5 (Pharmacia); 2) Eukaryotic—pWLNEO, pSV2CAT, pOG44, PXT1, pSG (Stratagene) pSVK3, pBPV, pMSG, pSVL (Pharmacia); and 3) Baculovirus—pPbac and pMbac (Stratagene). Any other plasmid or vector may be used as long as they are replicable and viable in the host. In some preferred embodiments of the present invention, mammalian expression vectors comprise an origin of replication, a suitable promoter and enhancer, and also any necessary ribosome binding sites, polyadenylation sites, splice donor and acceptor sites, transcriptional termination sequences, and 5′ flanking non-transcribed sequences. In other embodiments, DNA sequences derived from the SV40 splice, and polyadenylation sites may be used to provide the required non-transcribed genetic elements.

[0232] In certain embodiments of the present invention, the DNA sequence in the expression vector is operatively linked to an appropriate expression control sequence(s) (promoter) to direct mRNA synthesis. Promoters useful in the present invention include, but are not limited to, the LTR or SV40 promoter, the E. coli lac or trp, the phage lambda P_{L} and P_{R}, T3 and T7 promoters, and the cytomegalovirus (CMV) immediate early, herpes simplex virus (HSV) thymidine kinase, and mouse metallothionein-1 promoters and other promoters known to control expression of gene in prokaryotic or eukaryotic cells or their viruses. In other embodiments of the present invention, recombinant expression vectors include origins of replication and selectable markers permitting transformation of the host cell (e.g., dihydrofolate reductase or neomycin resistance for eukaryotic cell culture, or tetracycline or ampicillin resistance in E. coli).

[0233] In some embodiments of the present invention, transcription of the DNA encoding the polypeptides of the present invention by higher eukaryotes is increased by inserting an enhancer sequence into the vector. Enhancers are cis-acting elements of DNA, usually about from 10 to 300 bp that act on a promoter to increase its transcription. Enhancers useful in the present invention include, but are not limited to, the SV40 enhancer on the late side of the replication origin bp 100 to 270, a cytomegalovirus early promoter enhancer, the polyoma enhancer on the late side of the replication origin, and adenovirus enhancers.

[0234] In other embodiments, the expression vector also contains a ribosome binding site for translation initiation and a transcription terminator. In still other embodiments of the present invention, the vector may also include appropriate sequences for amplifying expression.

[0235] In some embodiments, retroviral vectors are utilized for expression in a suitable host cell. The production of a recombinant retroviral vector carrying a gene of interest is typically achieved in two stages. First, the gene of interest is inserted into a retroviral vector which contains the sequences necessary for the efficient expression of the gene of interest (including promoter and/or enhancer elements which may be provided by the viral long terminal repeats [LTRs] or by an internal promoter/enhancer and relevant splicing signals), sequences required for the efficient packaging of the viral RNA into infectious virions (e.g., the packaging signal [Psi], the tRNA primer binding site [−PBS], the 3′ regulatory sequences required for reverse transcription [+PBS] and the viral LTRs). The LTRs contain sequences required for the association of viral genomic RNA, reverse transcriptase and integrase functions, and sequences involved in directing the expression of the genomic RNA to be packaged in viral particles. For safety reasons, many recombinant retroviral vectors lack functional copies of the genes that are essential for viral replication (these essential genes are either deleted or disabled); the resulting virus is said to be replication defective or incompetent.

[0236] Second, following the construction of the recombinant vector, the vector DNA is introduced into a packaging cell line. Packaging cell lines provide viral proteins required in trans for the packaging of the viral genomic RNA into viral particles having the desired host range (i.e., the viral-encoded gag, pol and env proteins). The host range is controlled, in part, by the type of envelope gene product expressed on the surface of the viral particle. Packaging cell lines may express ecotrophic, amphotropic or xenotropic envelope gene products. Alternatively, the packaging cell line may lack sequences encoding a viral envelope (env) protein. In this case the packaging cell line will package the viral genome into particles that lack a membrane-associated protein (e.g., an env protein). In order to produce viral particles containing a membrane associated protein that will permit entry of the virus into a cell, the packaging cell line containing the retroviral sequences is transfected with sequences encoding a membrane-associated protein (e.g., the G protein of vesicular stomatitis virus [VSV]). The transfected packaging cell will then produce viral particles that contain the membrane-associated protein expressed by the transfected packaging cell line; these viral particles, which contain viral genomic RNA derived from one virus encapsidated by the envelope proteins of another virus are said to be pseudotyped virus particles.

[0237] Commonly used recombinant retroviral vectors are derived from the amphotropic Moloney murine leukemia virus (MoMLV) (Miller and Baltimore, Mol. Cell. Biol., 6:2895 [1986]). The MoMLV system has several advantages: 1) this specific retrovirus can infect many different cell types, 2) established packaging cell lines are available for the production of recombinant MoMLV viral particles and 3) the transferred genes are permanently integrated into the target cell chromosome. The established MoMLV vector systems comprise a DNA vector containing a small portion of the retroviral sequence (the viral long terminal repeat or “LTR” and the packaging or “psi” signal) and a packaging cell line. The gene to be transferred is inserted into the DNA vector. The viral sequences present on the DNA vector provide the signals necessary for the insertion or packaging of the vector RNA into the viral particle and for the expression of the inserted gene. The packaging cell line provides the viral proteins required for particle assembly (Markowitz et al., J. Virol., 62:1120 [1988]).

[0238] Other commonly used retrovectors are derived from lentiviruses including, but not limited to, human immunodeficiency virus (HIV) or feline immunodeficiency virus (FIV). Lentivirus vectors have the advantage of being able to infect non replicating cells.

[0239] The low titer and inefficient infection of certain cell types by retro vectors has been overcome by the use of pseudotyped retroviral vectors which contain the G protein of VSV as the membrane associated protein. Unlike retroviral envelope proteins which bind to a specific cell surface protein receptor to gain entry into a cell, the VSV G protein interacts with a phospholipid component of the plasma membrane (Mastromarino et al., J. Gen. Virol., 68:2359 [1977]). Because entry of VSV into a cell is not dependent upon the presence of specific protein receptors, VSV has an extremely broad host range. Pseudotyped retroviral vectors bearing the VSV G protein have an altered host range characteristic of VSV (i.e., they can infect almost all species of vertebrate, invertebrate and insect cells). Importantly, VSV G-pseudotyped retroviral vectors can be concentrated 2000-fold or more by ultracentrifugation without significant loss of infectivity (Burns et al., Proc. Natl. Acad. Sci. USA, 90:8033 [1993]).

[0240] The VSV G protein has also been used to pseudotype retroviral vectors based upon the human immunodeficiency virus (HIV) (Naldini et al., Science 272:263 [1996]). Thus, the VSV G protein may be used to generate a variety of pseudotyped retroviral vectors and is not limited to vectors based on MoMLV.

[0241] The majority of retroviruses can transfer or integrate a double-stranded linear form of the virus (the provirus) into the genome of the recipient cell only if the recipient cell is cycling (i.e., dividing) at the time of infection. Retroviruses that have been shown to infect dividing cells exclusively, or more efficiently, include MLV, spleen necrosis virus, Rous sarcoma virus human immunodeficiency virus, and other lentiviral vectors.

[0242] In some embodiments, peptides are synthesized de novo. A variety of peptide synthesis methods may be utilized. Examples include, but are not limited to, solid-phase peptide synthesis (SPPS), (R B. Merrifield (1963). “Solid Phase Peptide Synthesis. I. The Synthesis of a Tetrapeptide”. J. Am. Chem. Soc. 85 (14): 2149-2154; Mitchell, A. R. K., S. B. H.; Engelhard, M.; Merrifield, R. B. (1978). “A new synthetic route to tert-butyloxycarbonylaminoacyl-4-(oxymethyl)phenylacetamidomethyl-resin, an improved support for solid-phase peptide synthesis”. J. Org. Chem. 43 (13): 2845-2852). Recent developments in synthesis methods are further described in Hojo, Curr Opin Struct Biol 2014, 26C, 16-23; Ramakers et al., Chem Soc Rev 2014, 43, 2743-2756 and Chandrudu et al., Molecules 2013, 18, 4373-4388.

[0243] In a further embodiment, the present invention provides host cells containing the above-described constructs. In some embodiments of the present invention, the host cell is a higher eukaryotic cell (e.g., a mammalian or insect cell). In other embodiments of the present invention, the host cell is a lower eukaryotic cell (e.g., a yeast cell). In still other embodiments of the present invention, the host cell can be a prokaryotic cell (e.g., a bacterial cell). Specific examples of host cells include, but are not limited to, Escherichia coli, Salmonella typhimurium, Bacillus subtilis, and various species within the genera Pseudomonas, Streptomyces, and Staphylococcus, as well as Saccharomycees cerivisiae, Schizosaccharomycees pombe, Drosophila S2 cells, Spodoptera Sf9 cells, Chinese hamster ovary (CHO) cells, COS-7 lines of monkey kidney fibroblasts, (Gluzman, Cell 23:175 (1981)), C127, 3T3, 293, 293T, HeLa and BHK cell lines, T-1 (tobacco cell culture line), root cell and cultured roots in rhizosecretion (Gleba et al., (1999) Proc Natl Acad Sci USA 96:5973-5977).

[0244] The constructs in host cells can be used in a conventional manner to produce the gene product encoded by the recombinant sequence. In some embodiments, introduction of the construct into the host cell can be accomplished by calcium phosphate transfection, DEAE-Dextran mediated transfection, or electroporation (See e.g., Davis et al. (1986) Basic Methods in Molecular Biology). Alternatively, in some embodiments of the present invention, the polypeptides of the invention can be synthetically produced by conventional peptide synthesizers.

[0245] Proteins can be expressed in mammalian cells, yeast, bacteria, or other cells under the control of appropriate promoters. Cell-free translation systems can also be employed to produce such proteins using RNAs derived from the DNA constructs of the present invention. Appropriate cloning and expression vectors for use with prokaryotic and eukaryotic hosts are described by Sambrook, et al. (1989) Molecular Cloning: A Laboratory Manual, Second Edition, Cold Spring Harbor, N.Y.

[0246] In some embodiments of the present invention, following transformation of a suitable host strain and growth of the host strain to an appropriate cell density, the selected promoter is induced by appropriate means (e.g., temperature shift or chemical induction) and cells are cultured for an additional period. In other embodiments of the present invention, cells are typically harvested by centrifugation, disrupted by physical or chemical means, and the resulting crude extract retained for further purification. In still other embodiments of the present invention, microbial cells employed in expression of proteins can be disrupted by any convenient method, including freeze-thaw cycling, sonication, mechanical disruption, or use of cell lysing agents.

[0247] Vaccines:

[0248] A first set of embodiments addresses development of vaccines to prevent Zika infection in those at risk of infection. In some particular embodiments, sequences of proteins included in Zika vaccines are selected based on understanding of epitope mimics, in order to direct antibody responses to preferred epitopes. In particular embodiments of the invention, the sub polypeptides of the ZIKV envelope protein have been engineered to remove or to mutate peptides which are identified as epitope mimics for human proteins. In some cases, said human proteins are proteins which affect neurologic function and development. In particular cases, said epitope mimics occur in human neuropeptide Y. In yet other embodiments said mimic is in another neural protein, including, but not limited to, neurotrophin 4, neural cell adhesion molecule, neuron navigator, neurogenic differentiation factor, optineurin, cochlin, glial fibrillary acidic protein, glycoprotein M6A and others. In some particular embodiments, the epitope mimics located in Domain III loop and comprising amino acid motifs shown herein, are mutated or removed. In yet other embodiments peptide motifs in Domain I are modified to eliminate potential mimics. In some particular embodiments, a mimic, comprising the pentamer PRAEA, is found in Domain I which corresponds to an epitope in optineurin. In another embodiment, a mimic in Domain II comprising the pentamer MSSGT is found to match a B cell epitope in brain derived neurotrophic factor and in cochlin. In some embodiments, synthetic polypeptides are expressed which comprise sequences from which amino acids are deleted or mutated relative to the sequences in the native protein, to abrogate the mimic motif.

[0249] In yet other embodiments a polypeptide is selected from the structural proteins of ZIKV which avoids the identified problematic mimic motifs. For example, in some embodiments, the polypeptide comprises B cell epitopes that are unique to Zika virus and do not elicit antibodies which cross react with a dengue virus. In some embodiments, the polypeptide comprises one or more altered or deleted epitope mimic sequences so that the sequence of the synthetic Zika virus polypeptide is altered in comparison to the corresponding wild type Zika virus polypeptide. In some embodiments, the comprises one or more altered or deleted epitope mimic sequences comprising a deletion or substitution mutation of one or more amino acids in the epitope mimic sequence so that the sequence of the Zika virus polypeptide is altered in comparison to the corresponding wild type Zika virus polypeptide. In some embodiments, the polypeptide does not contain mimic from human proteins (e.g., human neurologic proteins such as those described in Tables 1, 6, 7, 8, and 9). Exemplary epitope mimetics are shown, for example, in SEQ ID NOs: 1-34, 78-140, and 255-256. In some embodiments, vaccines utilize variants of the described peptides or comprise flanking sequence as described above.

[0250] In some embodiments of the present invention, a synthetic envelope polypeptide is engineered to avoid including the potentially cross reactive sequences in Domain II which could lead to ADE if a prior infection with dengue or other flaviruses has occurred or follows Zika infection.

[0251] In addition to the embodiments described above, the identification of an epitope mimic GEDAP for dengue virus in neuropeptide Y raises concern that dengue virus vaccines may generate antibodies with deleterious neuropeptide binding properties unless modified to eliminate the epitope mimic. The motif GEDAP is found in most lineages of dengue serotype 3, including those circulating where ZIKV is currently endemic in Latin America. In a similar pattern, we have shown that Dengue serotype 1 carries a peptide mimic which matches an epitope in neural navigator protein 2. In this case, the motif TDKEK, found in domain III of dengue 1, is highly conserved. Hence modifications of envelope proteins or subunits thereof to remove such epitope mimics for dengue 1 and dengue 3 will lead to greater safety especially when such vaccines are used in an area co-endemic for Zika virus which also carries mimics for these two target proteins. It will be apparent to those skilled in the art that additional neurologic peptides within dengue virus, including dengue types 1, 2, 3 or 4, may be identified using the strategy described herein and that it will be desirable to mutate or remove the mimic peptides from vaccines in the interests of safety to avoid autoimmune reactions.

[0252] A further set of embodiments addresses development of vaccines containing NS1 of dengue and other flaviviruses, in which one or more epitope mimics capable of eliciting an autoimmune reaction are removed or mutated. In particular embodiments, NS1 epitopes are mimics of B cell epitopes which occur in cardiovascular function proteins. Of particular note is an embodiment in which we identify a mimic epitope pentamer, in the C terminal loop of dengue viruses, conserved in serotypes 1-4, which matches a B cell epitope in ADAMTS13. Multiple stimulations by this epitope, whether through natural infection or vaccination, or vaccination followed by repeated natural exposure would increase the titer of antibodies binding this enzyme with potentially deleterious effects. We also identify a mimic for platelet glycoprotein Ib beta chain in ZIKV. ZIKV NS1 is also the location of an epitope motif which is mimics for the microcephaly associated protein, ASPM.

[0253] In a further set of embodiments in the present invention we describe the epitopes and mimics thereof found in the structural proteins of Usutu virus, including envelope, PrM and capsid proteins.

[0254] In each of the cases where a potentially deleterious mimic occurs, it is desirable to avoid inclusion of a mimic epitope in a vaccine and thus we provide embodiments of vaccine constructs in which mimic epitopes have been deleted or mutated. In some embodiments, the mutation is a deletion mutation that removes all or part of the epitope mimic so that the polypeptide utilized in the vaccine does not cross react with antibodies specific for the wild type epitope mimic. In some embodiments, mutation is a substitution mutation or insertion mutation that alters the epitope mimic so that the polypeptide used in the vaccine does not cross react with antibodies specific for the wild type epitope mimic.

[0255] In some embodiments, the vaccine protein embodied in this invention may be expressed in a mammalian cell line, harvested, and delivered directly to the subject. In yet other embodiments, the vaccine polypeptide may be incorporated into a particular delivery vehicle, including but not limited to, a nanoparticle or virus like particle. In yet other embodiments, a ZIKV protein, engineered to delete or mutate epitope mimics may be incorporated as a chimera or pseudotype into a live virus vaccine where other proteins are derived from a heterologous flavivirus. In some particular embodiments, said heterologous flavivirus may be a yellow fever vaccine strain. In alternative embodiments, a viral vector, such as an adenoviral or poxvirus vector, may be used to deliver the synthetic vaccinal polypeptide. In yet other embodiments other modes of expression of the virus polypeptide are used which in some embodiments includes expression in a prokaryotic system. Those skilled in the art will be well aware of many alternative vaccine delivery vehicles as well as pharmaceutical compositions comprising adjuvants, so the above is not considered limiting.

[0256] In the present invention, we provide examples of constructs suitable for expression in mammalian cell lines of polypeptides as are described above. In assembling vector constructs for the expression of proteins and polypeptides, the skilled artisan has many options for choices of linkers of fusion partners, restriction sites for cloning, purification tags, cleavage sites, and in the case of immunoglobulin fusions, choices in the isotype and species of immunoglobulin. It will therefore be understood that the particular constructs provide examples of sequences which may be used to implement the inventions and are not to be considered limiting, as other combinations of all of these components many be equally effective and desirable. In some embodiments, we describe use of mouse immunoglobulin as a fusion partner, in others we describe human. In the examples shown, we adopt an enterokinase cleavage site to release standalone polypeptides; other cleavage sites including, but not limited to, a Factor Xa site, a serine glycine chain and many other possible linkers and cleavable linkers may be used. His tags are included to facilitate purification; but the same polypeptides may be produced without a histag or with a different purification tag.

[0257] In some embodiments, vaccines comprise peptides (e.g., those described herein). In some embodiments, vaccines are DNA vaccines comprising naked DNA encoding the peptides described herein or vectors or viral particles comprising nucleic acids encoding the peptides. As used herein, the term “vaccine” refers to any combination of nucleic acid, peptides or single peptide formulation. There are various reasons why one might wish to administer a vaccine of a combination of the nucleic acids or peptides of the present invention rather than a single peptide. Depending on the particular peptide that one uses, a vaccine might have superior characteristics as far as clinical efficacy, solubility, absorption, stability, toxicity and patient acceptability are concerned. It should be readily apparent to one of ordinary skill in the art how one can formulate a vaccine of any of a number of combinations of peptides of the present invention. There are many strategies for doing so, any one of which may be implemented by routine experimentation.

[0258] In some embodiments, provided herein is a subunit vaccine comprising a flaviruses peptide or polypeptide described herein (e.g., a peptide described herein or a portion or variant thereof). A subunit vaccine presents an antigen to the immune system without introducing viral particles, whole or otherwise. In some embodiments, subunit vaccines are generated by recombinant expression of peptide using the methods described herein.

[0259] In some embodiments, DNA vaccines comprise nucleic acids encoding an epitope polypeptide described herein in a vector suitable for expression of the nucleic acid. In some embodiments, the nucleic acid is expressed in an expression cassette. In particular embodiments, the expression cassette is a eukaryotic expression cassette. The term “eukaryotic expression cassette” refers to an expression cassette which allows for expression of the open reading frame in a eukaryotic cell. A eukaryotic expression cassette comprises regulatory sequences that are able to control the expression of an open reading frame in a eukaryotic cell, preferably a promoter and polyadenylation signal. Promoters and polyadenylation signals included in the recombinant DNA molecules are selected to be functional within the cells of the subject to be immunized. Examples of suitable promoters, especially for the production of a DNA vaccine for humans, include but are not limited to promoters from cytomegalovirus (CMV), such as the strong CMV immediate early promoter, Simian virus 40 (SV40), Mouse Mammary Tumor Virus (MMTV), Human Immunodeficiency Virus (HIV), such as the HIF Long Terminal Repeat (LTR) promoter, Moloney virus, Epstein Barr Virus (EBV), and from Rous Sarcoma Virus (RSV) as well as promoters from human genes such as human actin, human myosin, human hemoglobin, human muscle creatine, and human metallothionein. In a particular embodiment, the eukaryotic expression cassette contains the CMV promoter. In the context of the present invention, the term “CMV promoter” refers to the strong immediate-early cytomegalovirus promoter.

[0260] Examples of suitable polyadenylation signals, especially for the production of a DNA vaccine for humans, include but are not limited to the bovine growth hormone (BGH) polyadenylation site, SV40 polyadenylation signals and LTR polyadenylation signals.

[0261] Other elements can also be included in the recombinant DNA molecule. Such additional elements include enhancers. The enhancer can be, for example, the enhancer of human actin, human myosin, human hemoglobin, human muscle creatine and viral enhancers such as those from CMV, RSV and EBV.

[0262] Regulatory sequences and codons are generally species dependent, so in order to maximize protein production, the regulatory sequences and codons are preferably selected to be effective in the species to be immunized. The person skilled in the art can produce recombinant DNA molecules that are functional in a given subject species.

[0263] In some embodiments, vaccines are adenoviral vaccines (See e.g., Tatsis and Ertl, Mol Ther. 2004 October: 10(4):616-29; herein incorporated by reference). Adenoviral vectors are attractive candidates for transfer of foreign genes for a number of reasons. The adenoviral genome is well characterized and comparatively easy to manipulate. Most adenoviruses cause mild diseases in immunocompetent human adults and by deletion of crucial regions of the viral genome the vectors can be rendered replication-defective, which increases their predictability and reduces unwanted side effects. Adenoviruses have a broad tropism infecting a variety of dividing and nondividing cells. They can be grown to high titers in tissue culture. They can be applied systemically as well as through mucosal surfaces and their relative thermostability facilitates their clinical use.

[0264] Thus far most efforts have focused on vectors derived from adenovirus of the human serotype 5 (AdHu5) for use as vaccines for humans, while bovine, porcine, and ovine adenoviruses have been explored for veterinary use. In some embodiments, the

[0265] In some embodiments, vaccines comprise a live, attenuated chimeric flavivirus that comprises a Yellow Fever virus in which the pre-membrane and envelope proteins have been replaced with sequences of the peptides described herein. General methods for constructing and administering chimeric flaviviruses that can be used in the present invention are described in detail, for example, in U.S. patent application Ser. Nos. 09/007,664, 09/121,578 (issued as U.S. Pat. No. 6,962,708), and Ser. No. 09/452,638 issued as U.S. Pat. No. 6,696,281); International applications PCT/US98/03894 (WO 98/37911) and PCT/US00/32821 (WO 01/39802); and Chambers et al., J. Virol. 73:3095 3101, 1999, which are each incorporated by reference herein in their entirety.

[0266] In some embodiments, vaccines comprise Virus-like particles (VLPs), structures similar or identical to mature virions but lacking the viral genome.

[0267] The vaccines of the present invention may be administered as a single agent therapy or in addition to an established therapy. The appropriate dosage of the vaccines of the invention may depend on a variety of factors. Such factors may include, but are in no way limited to, a patient's physical characteristics (e.g., age, weight, sex), whether the compound is being used as single agent or adjuvant therapy, the type of MHC restriction of the patient, the progression (i.e., pathological state) of the infection or other epitope-sensitive condition, and other factors that may be recognized by one skilled in the art. In general, an epitope or combination of epitopes may be administered to a patient in an amount of from about 50 micrograms to about 5 mg; dosage in an amount of from about 50 micrograms to about 500 micrograms is especially preferred.

[0268] For example, in some embodiments, the polypeptides comprising one or more epitopes are conjugated or otherwise attached to a carrier protein. Suitable carrier proteins include, but are not limited to keyhole limpet hemocyanin, bovine serum albumin, ovalbumin, and thyroglobulin. In yet other embodiments the polypeptide may be fused to an Fc region of an immunoglobulin for delivery to a mucosal site bearing corresponding receptors.

[0269] One may administer a vaccine of the present invention by any suitable method, which may include, but is not limited to, systemic injections (e.g., subcutaneous injection, intradermal injection, intramuscular injection, intravenous infusion) mucosal administrations (e.g., nasal, ocular, oral, vaginal and anal formulations), topical administration (e.g., patch delivery), or by any other pharmacologically appropriate technique. Vaccination protocols using a spray, drop, aerosol, gel or sweet formulation are particularly attractive and may be also used. The vaccine may be administered for delivery at a particular time interval, or may be suitable for a single administration.

[0270] Vaccines of the invention may be prepared by combining at least one nucleic acid, virus, polypeptide, or peptide with a pharmaceutically acceptable liquid carrier, a finely divided solid carrier, or both. As used herein, “pharmaceutically acceptable carrier” refers to a carrier that is compatible with the other ingredients of the formulation and is not toxic to the subjects to whom it is administered. Suitable such carriers may include, for example, water, alcohols, natural or hardened oils and waxes, calcium and sodium carbonates, calcium phosphate, kaolin, talc, lactose, combinations thereof and any other suitable carrier as will be recognized by one of skill in the art. In a most preferred embodiment, the carrier is present in an amount of from about 10 uL (micro-Liter) to about 100 uL.

[0271] In some embodiments, the vaccine composition includes an adjuvant. Examples of adjuvants include, but are not limited to, mineral salts (e.g., aluminum hydroxide and aluminum or calcium phosphate gels); oil emulsions and surfactant based formulations (e.g., MF59 (microfluidized detergent stabilized oil-in-water emulsion), QS21 (purified saponin), Ribi Adjuvant Systems, AS02 [SBAS2] (oil-in-water emulsion+MPL+QS-21), Montanide ISA-51 and ISA-720 (stabilized water-in-oil emulsion); particulate adjuvants (e.g., virosomes (unilamellar liposomal vehicles incorporating influenza haemagglutinin), AS04 ([SBAS4] Al salt with MPL), ISCOMS (structured complex of saponins and lipids), polylactide co-glycolide (PLG); microbial derivatives (natural and synthetic), e.g., monophosphoryl lipid A (MPL), Detox (MPL+M. Phlei cell wall skeleton), AGP [RC-529] (synthetic acylated monosaccharide), DC_Chol (lipoidal immunostimulators able to self organize into liposomes), OM-174 (lipid A derivative), CpG motifs (synthetic oligonucleotides containing immunostimulatory CpG motifs), modified LT and CT (genetically modified bacterial toxins to provide non-toxic adjuvant effects); endogenous human immunomodulators (e.g., hGM-CSF or hIL-12 (cytokines that can be administered either as protein or plasmid encoded), Immudaptin (C3d tandem array); and inert vehicles, such as gold particles. In various embodiments, vaccines according to the invention may be combined with one or more additional components that are typical of pharmaceutical formulations such as vaccines, and can be identified and incorporated into the compositions of the present invention by routine experimentation. Such additional components may include, but are in no way limited to, excipients such as the following: preservatives, such as ethyl-p-hydroxybenzoate; suspending agents such as methyl cellulose, tragacanth, and sodium alginate; wetting agents such as lecithin, polyoxyethylene stearate, and polyoxyethylene sorbitan mono-oleate; granulating and disintegrating agents such as starch and alginic acid; binding agents such as starch, gelatin, and acacia; lubricating agents such as magnesium stearate, stearic acid, and talc; flavoring and coloring agents; and any other excipient conventionally added to pharmaceutical formulations.

[0272] Further, in various embodiments, vaccines according to the invention may be combined with one or more of the group consisting of a vehicle, an additive, a pharmaceutical adjunct, a therapeutic compound or agent useful in the treatment of the desired disease, and combinations thereof.

[0273] Peptide and Peptidomimetic Drugs:

[0274] A further set of embodiments, enabled by the present invention, address the use of peptides or peptidomimetics to bind antibodies generated in response to Zika virus. In some embodiments, small peptides comprising the mimic motif are incorporated into a substrate over which plasma from a subject infected with Zika or dengue is passed and to which antibodies in the plasma bind. To achieve such substrate binding it may be useful to generate the peptides in fusion with a histag, FLAG tag or other tag known to those skilled in the art that facilitates binding to the substrate.

[0275] Diagnostics:

[0276] A critical need in managing the ZIKV epidemic is the provision of diagnostic tools to physicians to enable in clinic diagnosis and hence the appropriate counselling of pregnant women and rapid initiation of GBS treatment. A particular consideration is that ZIKV co-circulates in the environment with dengue virus as well as yellow fever, and a number of non flavivirus co-endemic pathogens such as chikungunya and Plasmodium. Differentiating both acute febrile disease, and diagnosing GBS, requires a diagnostic test that separates ZIKV from dengue, and also identifies those dengue infections, thought to be only dengue type 3, which could sporadically also lead to GBS. In a particular embodiment, therefore, an immunodiagnostic kit is described which will differentiate Zika and dengue, and also infections with strains of dengue which may result in GBS. A second consideration is that determining the duration of Zikaantibodies may determine when it is safe for a woman to conceive without risk of teratogenic sequalae. In another embodiment, therefore, an epitope specific immunoassay kit is described which shows antibody responses to an array of one or more Zika epitopes. In some particularly preferred embodiments, the peptide, polypeptide and protein sequences described above are used as capture reagents in an immunoassay. The present invention encompasses use of the capture reagents in a wide variety of immunoassay formats, including, but not limited to, ELISAs, chip-based assays and arrays, bead-based assays, flow through assays and the like as are known in the art.

[0277] In one embodiment, the peptides identified as mimics are included in peptide arrays or presented as peptides for antibody binding within the context of the adjacent ZIKV sequences. In yet other embodiments a synthetic version of the neurologic target protein is incorporated in a diagnostic kit to enable demonstration of binding by antibodies to the mimic target.

[0278] In a further embodiment, the present invention addresses the need for epitope specific diagnosis, and the need to differentiate between infections with Zika virus, and serotypes of dengue virus and yellow fever. As USUV spreads into dengue and ZIKV endemic areas it will be further necessary to differentiate from this flavivirus infection. In yet another embodiment, peptides of USUV structural proteins, which may be incorporated into a diagnostic peptide array alongside peptides from other flaviviruses, thereby enabling a peptide based diagnostic kit that provides for differentiation between USUV as well as ZIKV, dengue, yellow fever, West Nile virus, other arboviruses such as chikungunya virus, and other coendemic pathogens is provided.

[0279] The present invention addresses diagnostic peptides derived from structural proteins, including envelope, capsid and PrM, and from non structural proteins, in particular but not limited to NS1 proteins, from ZIKV and other flaviviruses as further detailed below. In one embodiment of the present invention we address a peptide derived from the NS1 protein of each virus which can provide differentiation in detection of antibodies. By identifying high probability antibody binding peptides specific for each virus as a reagent for a diagnostic kit, the present invention enables differential serologic diagnosis based on epitopes of NS1 protein.

[0280] In particular embodiments the peptides identified may be coupled to an anchor peptide to facilitate their attachment to a substrate, such anchor peptides include, but are not limited to, a his tag or a Flag tag. In yet additional embodiments, the peptides of interest may be fused to a label peptide such as luciferase or green fluorescent protein. These examples of label and anchor peptides should not be considered limiting as other alternatives are well known to those skilled in the art.

[0281] A further diagnostic kit allows differentiation of Zika and related flaviviruses from other potentially co-endemic organisms such as, but not limited to Saint Louis Encephalitis virus, hepatitis C, Japanese encephalitis virus, parvovirus 19, enteroviruses, Ross River virus, Eastern equine encephalitis and Plasmodium spp.

[0282] Any suitable diagnostic method may be employed in practice of the present invention. In some embodiments, the assay is an immunoassay. Illustrative non-limiting examples of immunoassays include, but are not limited to: immunoprecipitation; Western blot; ELISA; immunohistochemistry; immunocytochemistry; flow cytometry; and, immuno-PCR. Polyclonal or monoclonal antibodies detectably labeled using various techniques known to those of ordinary skill in the art (e.g., colorimetric, fluorescent, chemiluminescent or radioactive) are suitable for use in the immunoassays. The assays may be singleplex assays or multiplex assays. In some embodiments, the peptides, polypeptides and proteins described herein are used as capture reagents in the assays, i.e., the peptides, polypeptides and proteins described herein are configured in the assay system to capture antibodies specific for antigens in the peptides, polypeptides and/or proteins form a biological sample such as a serum or blood sample from a subject suspected of being infected by a flavivirus. The binding of the antibody or antibodies from the biological sample is then detected by methods known in the art (e.g., detection with a labelled second antibody and other methods described herein).

[0283] In singleplex assays, an antigenic composition or capture reagent comprising one of the peptides described herein is utilized in the assay. In multiplex assays, a panel of antigenic compositions or capture reagents are utilized in the assay. In some embodiments, the panel comprises at least 2, 3, 5, 5, 6, 7, 8, 9, 10, 11, 12, 13, 14, 15, 16, 17, 18, 19, 20, 25, 30, 40, 50, 60, 70, 80, 90 or 100 or more of the peptides described herein.

[0284] In some embodiments, the capture reagent of antigenic composition is brought in contact with, and allowed to bind to, a solid support or carrier, such as nitrocellulose or polystyrene or any other solid support known in the art (see below), allowing the antigens to adsorb and become immobilized to the solid support. This immobilized antigen is then allowed to interact with the biological fluid sample which is being tested for the presence of anti-flavivirus antibodies, such that any antibodies in the sample will bind to the immobilized antigen. The support to which the antibody is now bound may then be washed with suitable buffers after which a detectably labeled binding partner for the antibody is introduced. The binding partner binds to the immobilized antibody. Detection of the label is a measure of the immobilized antibody. In some embodiments, the immunoassay of this invention may be a “two-site” or “sandwich” assay. The fluid containing the antibody being assayed is allowed to contact a solid support. After addition of the antigen(s), a quantity of detectably labeled soluble antibody is added to permit detection and/or quantitation of the ternary complex formed between solid-phase antibody, antigen, and labeled antibody. Sandwich assays are described by Wide, Radioimmune Assay Method, Kirkham et al, Eds., E. & S. Livingstone, Edinburgh, 1970, pp 199-206.

[0285] A preferred binding partner for these assays is an anti-immunoglobulin antibody (“second antibody”) produced in a different species. Thus to detect a nonhuman primate antibody, a detectably labeled goat anti-simian immunoglobulin “second” antibody may be used. The solid phase support may then be washed with the buffer a second time to remove unbound antibody. The amount of bound label on the solid support may then be detected by conventional means appropriate to the type of label used (see below).

[0286] Such a “second antibody” may be specific for epitopes characteristic of a particular human immunoglobulin isotype, for example IgM, IgG₁, IgG₂ₐ, IgA and the like, thus permitting identification of the isotype or isotypes of antibodies in the sample which are specific for the flavivirus antigen. Alternatively, the second antibody may be specific for an idiotype of the anti-flavivirus antibody of the sample.

[0287] As alternative binding partners for detection of the sample antibody, other known binding partners for human immunoglobulins may be used. Examples are the staphylococcal immunoglobulin binding proteins, the best know of which is protein A. Also intended is staphylococcal protein G, or a recombinant fusion protein between protein A and protein G. Protein G of group G and group C streptococci binds to the Fc portion of Ig molecules as well as to IgG Fab fragment at the V_{H3} domain. Protein C of Peptococcus magnus binds to the Fab region of the immunoglobulin molecule. Any other microbial immunoglobulin binding proteins, for example from Streptococci, are also intended (for example, Langone, J. J., Adv. Immunol 32:157 (1982)).

[0288] In another embodiment of this invention, a biological fluid suspected of containing antibodies specific for a flavivirus antigen may be brought into contact with a solid support or carrier which is capable of immobilizing soluble proteins. The support may then be washed with suitable buffers followed by treatment with flavivirus antigensreagent, which may be detectably labeled. Bound antigen is then measured by measuring the immobilized detectable label. If the flavivirus antigen reagent is not directly detectably labeled, a second reagent comprising a detectably labeled binding partner for the flavivirus antigen, generally a second anti-flavivirus antibody such as a murine mAb, is allowed to bind to any immobilized antigen. The solid phase support may then be washed with buffer a second time to remove unbound antibody. The amount of bound label on said solid support may then be detected by conventional means.

[0289] By “solid phase support” or carrier is intended any support capable of binding a proteinaceous antigen or antibody molecules or other binding partners according to the present invention. Well-known supports, or carriers, include glass, polystyrene, polypropylene, polyethylene, polyvinylidene difluoride, dextran, nylon, magnetic beads, amylases, natural and modified celluloses, polyacrylamides, agaroses, and magnetite. The nature of the carrier can be either soluble to some extent or insoluble for the purposes of the present invention. The support material may have virtually any possible structural configuration so long as it is capable of binding to an antigen or antibody. Thus, the support configuration may be spherical, as in a bead, or cylindrical, as in the inside surface of a test tube, or the external surface of a rod. Alternatively, the surface may be flat such as a sheet, test strip, etc. Preferred supports include polystyrene beads, 96-well polystyrene microplates and test strips, all well-known in the art. Those skilled in the art will know many other suitable carriers for binding antibody or antigen, or will be able to ascertain the same by use of routine experimentation.

[0290] Using any of the assays described herein, those skilled in the art will be able to determine operative and optimal assay conditions for each determination by employing routine experimentation. Furthermore, other steps as washing, stirring, shaking, filtering and the like may be added to the assays as is customary or necessary for the particular situation.

[0291] In some embodiments, the present invention provides protein chip assays comprising one or more capture reagents or antigenic compositions comprising at least one the peptides described herein. In such an assay, the capture reagents or antigenic compositions are immobilized on a solid support such as a chip. In some embodiments, the protein chip assay utilizes a solid support coated with ultrathin or clear nitrocellulose. See, e.g., US PAT PUBL. 20090253586 and 20090075828, both of which are incorporated herein by reference in their entirety. In preferred embodiments, the capture reagents or antigenic compositions are arrayed on the solid support. In multiplexed assays, a panel of capture reagents or antigenic compositions as described above is arrayed on the solid support. See, e.g., US PAT PUBL. 20090253586 and 20090075828, both of which are incorporated herein by reference in their entirety. A sample from a subject is passed over the solid support. Bound antibodies from the sample are then detected using any suitable method. Other suitable protein chip assays are described, for example, in U.S. Pat. No. 6,197,599; U.S. Pat. No. 6,294,790 and US Patent Application US20010014461A1, each of which is herein incorporated by reference in its entirety).

[0292] In some embodiments, a cytometric bead array assay is used (Quantum Plex kit, Bangs Laboratories; Cytometric Bead Array kit, BD Biosciences). These systems allow for multiple analyte detection with small volume samples. In other embodiments, a LUMINEX bead assay is used. See, e.g., U.S. Pat. Nos. 6,916,661; 6,939,720; 7,141,431; 7,445,844; 7,465,540; 8,038,734; and 8,088,629, all of which are incorporated herein by reference in their entirety.

[0293] In some embodiments, the immunoassay used to detect an antibody specific for an flavivirus antigen according to the present invention is an enzyme-linked immunosorbent assay (ELISA) or more generically termed an enzyme immunoassay (EIA). In such assays, a detectable label bound to either an antibody-binding or antigen-binding reagent is an enzyme. When exposed to its substrate, this enzyme will react in such a manner as to produce a chemical moiety which can be detected, for example, by spectrophotometric, fluorometric or visual means. Enzymes which can be used to detectably label the reagents useful in the present invention include, but are not limited to, horseradish peroxidase, alkaline phosphatase, glucose oxidase, β-galactosidase, ribonuclease, urease, catalase, malate dehydrogenase, staphylococcal nuclease, asparaginase, delta-5-steroid isomerase, yeast alcohol dehydrogenase, α-glycerophosphate dehydrogenase, triose phosphate isomerase, glucose-6-phosphate dehydrogenase, glucoamylase and acetylcholinesterase. For descriptions of EIA procedures, see reference cited above or, additionally, Voller, A. et al., J. Clin. Pathol. 31:507-520 (1978); Butler, J. E., Meth. Enzymol. 73:482-523 (1981); Maggio, E. (ed.), Enzyme Immunoassay, CRC Press, Boca Raton, 1980.

[0294] In some embodiments, the immunoassay devices of the present invention permit the performance of relatively inexpensive, disposable, membrane-based assays for the visual identification of the presence (or absence) of an analyte in a liquid sample. Such devices are usually formatted as freestanding dipsticks (e.g., test strips) or as devices having some sort of housing. Typically, an immunoassay device of the present invention can be used with as little as about 200 μl of liquid sample, and detection of an analyte in the sample can (but need not) be complete within 2-5 minutes. In preferred embodiments, no ancillary instrumentation is required to perform such tests, and such devices easily can be used in clinics, laboratories, field locations, and the home even by inexperienced persons.

[0295] In some embodiments, the ELISA is an immunochromatographic “sandwich” assay. In general, sandwich immunochromatographic procedures call for mixing the sample that may contain the analyte to be assayed, for example, flavivirus antibodies, with an antigenic composition or capture reagent as described above. A detector reagent is utilized which is mobile and typically is linked to a label or another signaling reagent, such as dyed latex, a colloidal metal sol, or a radioisotope. This mixture is then applied to a chromatographic medium containing a band or zone of immobilized antigenic compositions that serve as antigens for flavivirus antibodies (i.e., the capture reagent). The chromatographic medium often is in the form of a strip that resembles a dipstick. When the complex of flavivirus antibody and the detector reagent reaches the zone of the immobilized capture antibody on the chromatographic medium, binding occurs and the detector reagent complex is localized at the zone. This indicates the presence of the molecule to be assayed. This technique can be used to obtain quantitative or semi-quantitative results. Examples of sandwich immunoassays performed on test strips are described in U.S. Pat. Nos. 4,168,146 and 4,366,241, each of which is incorporated herein by reference.

[0296] In other embodiments, the ELISA is a solid phase immunoassay device that provides sensitive detection of analytes in biological fluid samples. Solid phase immunoassay devices incorporate a solid support to which one member of a ligand-receptor pair, usually an antibody, antigen, or hapten, is bound. Common early forms of solid supports were plates, tubes, or beads of polystyrene, which were known from the fields of radioimmunoassay and enzyme immunoassay. More recently, a number of porous materials such as nylon, nitrocellulose, cellulose acetate, glass fibers, and other porous polymers have been employed as solid supports. In other common forms of membrane-based immunoassays, as typified by some home pregnancy and ovulation detection kits, a test strip (or dipstick) is “dipped” into a sample suspected of containing the subject analyte. Enzyme-labeled detector reagent is then added, either simultaneously or after an incubation period. The device next is washed and then inserted into a second solution containing a substrate for the enzyme. The enzyme label, if present, interacts with the substrate, causing the formation of colored products, which either deposit as a precipitate onto the solid phase or produce a visible color change in the substrate solution. EP-A 0 125 118 describes such a sandwich type dipstick immunoassay. EP-A 0 282 192 describes a dipstick device for use in competition type assays.

[0297] In other embodiments, the assay device of the present invention is a flow through immunoassay device. Flow-through immunoassay devices involve a capture reagent (such as an immunogenic composition comprising at least one of the peptides described herein) bound to a porous membrane or filter to which a liquid sample is added. As the liquid flows through the membrane, target analyte (such as an flavivirus antibody) binds to the capture reagent. The addition of sample is followed by (or made concurrent with) addition of detector reagent (e.g., labeled second antibody). Alternatively, the detector reagent may be placed on the membrane in a manner that permits the detector to mix with the sample and thereby label the analyte. The visual detection of detector reagent provides an indication of the presence of target analyte in the sample. Representative flow-through immunoassay devices are described in U.S. Pat. Nos. 4,246,339; 4,277,560; 4,632,901; 4,812,293; 4,920,046; and 5,279,935; and U.S. Patent Application Publication Nos. 20030049857 and 20040241876, all of which are incorporated by reference in their entirety. In some embodiments, the assay device is a migration assay device. Such devices usually incorporate within them reagents that have been attached to colored labels, thereby permitting visible detection of the assay results without addition of further substances. See, for example, U.S. Pat. No. 4,770,853; PCT Publication No. WO 88/08534 and European Patent No. EP-A 0 299 428, all of which are incorporated by reference in their entirety.

[0298] In some embodiments, the assay device is lateral flow assay device. There are a number of commercially available lateral flow type tests and patents disclosing methods for the detection of analytes. See, e.g., U.S. Pat. Nos. 5,229,073; 5,591,645; 4,168,146; 4,366,241; 4,855,240; 4,861,711; 4,703,017; 5,451,504; 5,451,507; 5,798,273; 6,001,658: and 5,120,643; European Patent No. 0296724; WO 97/06439; and WO 98/36278, all of which are incorporated herein by reference.

[0299] The lateral flow assay devices of the present invention include a strip of absorbent or porous material (such as a microporous membrane), which, in some instances, can be made of different substances each joined to the other in zones, which may be abutted and/or overlapped. In some examples, the absorbent strip can be fixed on a supporting non-interactive material (such as nonwoven polyester), for example, to provide increased rigidity to the strip. Zones within each strip may differentially contain the specific binding partner(s) and/or other reagents required for the detection and/or quantification of the particular analyte being tested for, for example, flavivirus antibodies. Thus these zones can be viewed as functional sectors or functional regions within the test device.

[0300] In some embodiments, a fluid sample (or a sample suspended in a fluid) is introduced to the strip at the proximal end of the strip, for instance by dipping or spotting. A sample is collected or obtained using methods well known to those skilled in the art. The sample containing the flavivirus antibodies to be detected may be obtained from any biological source. Examples of biological sources include blood serum, blood plasma, urine, spinal fluid, saliva, fermentation fluid, lymph fluid, tissue culture fluid and ascites fluid of a human or animal. The sample may be diluted, purified, concentrated, filtered, dissolved, suspended or otherwise manipulated prior to immunoassay to optimize the immunoassay results. The fluid migrates distally through all the functional regions of the strip. The final distribution of the fluid in the individual functional regions depends on the adsorptive capacity and the dimensions of the materials used.

[0301] In some embodiments, porous solid supports, such as nitrocellulose, described hereinabove are preferably in the form of sheets or strips. The thickness of such sheets or strips may vary within wide limits, for example, from about 0.01 to 0.5 mm, from about 0.02 to 0.45 mm, from about 0.05 to 0.3 mm, from about 0.075 to 0.25 mm, from about 0.1 to 0.2 mm, or from about 0.11 to 0.15 mm. The pore size of such sheets or strips may similarly vary within wide limits, for example from about 0.025 to 15 microns, or more specifically from about 0.1 to 3 microns; however, pore size is not intended to be a limiting factor in selection of the solid support. The flow rate of a solid support, where applicable, can also vary within wide limits, for example from about 12.5 to 90 sec/cm (i.e., 50 to 300 sec/4 cm), about 22.5 to 62.5 sec/cm (i.e., 90 to 250 sec/4 cm), about 25 to 62.5 sec/cm (i.e., 100 to 250 sec/4 cm), about 37.5 to 62.5 sec/cm (i.e., 150 to 250 sec/4 cm), or about 50 to 62.5 sec/cm (i.e., 200 to 250 sec/4 cm). In specific embodiments of devices described herein, the flow rate is about 62.5 sec/cm (i.e., 250 sec/4 cm). In other specific embodiments of devices described herein, the flow rate is about 37.5 sec/cm (i.e., 150 sec/4 cm).

[0302] In some embodiments, the assay devices include a detector reagent. The detector reagent provides a means to detect the formation of a complex between an analyte (such as an flavivirus antibody or antibodies) and a capture reagent (such as an antigenic composition as described above). A detector may be integrated into an immunoassay device (for example included in a conjugate pad, as described below), or may be applied to the device from an external source.

[0303] A detector may be a single reagent or a series of reagents that collectively serve the detection purpose. In some instances, a detector reagent is a labeled binding partner specific for the analyte. In other instances, a detector reagent collectively includes an unlabeled first binding partner specific for the analyte and a labeled second binding partner specific for the first binding partner and so forth. In each instance, a detector reagent specifically detects bound analyte of an analyte-capture reagent complex and, therefore, a detector reagent preferably does not substantially bind to or react with the capture reagent or other components localized in the analyte capture area. Such non-specific binding or reaction of a detector may provide a false positive result. Optionally, a detector reagent can specifically recognize a positive control molecule (such as a non-specific human IgG for a labeled Protein A detector, or a labeled Protein G detector, or a labeled anti-human Ab(Fc)) that is present in a secondary capture area.

[0304] The flow-through devices of the present invention comprise a capture reagent (e.g., antigenic composition as described above) immobilized on a solid support such as a microtiter plate or a membrane (such as, nitrocellulose, nylon, or PVDF). Characteristics of useful membrane have been previously described; however, it is useful to note that in a flow-through assay capillary rise is not a particularly important feature of a membrane as the sample moves vertically through the membrane rather than across it as in a lateral flow assay. In a simple representative format, the membrane of a flow-through device is placed in functional or physical contact with an absorbent layer (see, e.g., description of “absorbent pad” below), which acts as a reservoir to draw a fluid sample through the membrane. Optionally, following immobilization of a capture reagent, any remaining protein-binding sites on the membrane can be blocked (either before or concurrent with sample administration) to minimize nonspecific interactions.

[0305] In operation of a flow-through device, a fluid sample (such as a bodily fluid sample) is placed in contact with the membrane. Typically, a flow-through device also includes a sample application area (or reservoir) to receive and temporarily retain a fluid sample of a desired volume. The sample passes through the membrane matrix. In this process, an analyte in the sample (e.g., flavivirus antibody or antibodies) can specifically bind to the immobilized capture reagent. Where detection of an analyte-capture reagent complex is desired, a detector reagent (e.g., labeled Protein A, labeled second antibody) can be added with the sample or a solution containing a detector reagent can be added subsequent to application of the sample. If an analyte is specifically bound by capture reagent, a visual representative attributable to the particular detector reagent can be observed on the surface of the membrane. Optional wash steps can be added at any time in the process, for instance, following application of the sample, and/or following application of a detector reagent.

[0306] A lateral flow device is an analytical device comprising a test strip, through which flows a test sample fluid that is suspected of containing an analyte of interest. The test fluid and any suspended analyte can flow along the strip to a detection zone in which the analyte (if present) interacts with a capture agent and a detection agent to indicate a presence, absence and/or quantity of the analyte. Many lateral flow devices are one-step lateral flow assays in which a biological fluid is placed in a sample area on a bibulous strip (though, non-bibulous materials can be used, and rendered bibulous, e.g., by applying a surfactant to the material), and allowed to migrate along the strip until the liquid comes into contact with a specific binding partner that interacts with an analyte in the liquid. Once the analyte interacts with the binding partner, a signal (such as a fluorescent or otherwise visible dye) indicates that the interaction has occurred. Multiple discrete binding partners can be placed on the strip (for example in parallel lines) to detect multiple analytes in the liquid. The test strips can also incorporate control indicators, which provide a signal that the test has adequately been performed, even if a positive signal indicating the presence (or absence) of an analyte is not seen on the strip.

[0307] The construction and design of lateral flow devices is described, for example, in Millipore Corporation, A Short Guide Developing Immunochromatographic Test Strips, 2nd Edition, pp. 1-40, 1999, available by request at (800) 645-5476; and Schleicher & Schuell, Easy to Work with BioScience, Products and Protocols 2003, pp. 73-98, 2003, available by request at Schleicher & Schuell BioScience, Inc., 10 Optical Avenue, Keene, N.H. 03431, (603) 352-3810; both of which are incorporated herein by reference. Lateral flow devices have a wide variety of physical formats. Any physical format that supports and/or houses the basic components of a lateral flow device in the proper function relationship is contemplated by this disclosure.

[0308] In some embodiments, lateral flow devices of the present invention comprise an elongated housing containing a bibulous lateral flow strip that extends substantially the entire length of housing. In some embodiments, the lateral flow strip is divided into a proximal sample application pad positioned below a sample introduction port, an intermediate test result membrane, and a distal absorbent pad. The flow strip is interrupted by a conjugate pad that contains labeled conjugate (such labeled second antibody). A flow path along the strip passes from the proximal pad, through conjugate pad, into a test result membrane, for eventual collection in absorbent pad. Selective binding agents (such as the antigenic compositions described above) are positioned on a proximal test line in the test result membrane. A control line is provided in the test result membrane slightly distal to the test line. A fluid sample containing an analyte of interest, such as flavivirus antibody or antibodies, is applied to the sample pad through the sample introduction port. In some embodiments, the sample may be applied to the sample introduction port dropwise or by dipping the end of the device containing the sample introduction port into the sample. From the sample pad, the sample passes, for instance by capillary action, to the conjugate pad. In the conjugate pad, the analyte of interest may bind (or be bound by) a mobilized or mobilizable detector reagent. For example, an flavivirus antibody may bind to a labeled (e.g., gold-conjugated) detector reagent (such as a second antibody contained in the conjugate pad. The analyte complexed with the detector reagent may subsequently flow to the test result membrane where the complex may further interact with a capture reagent, such as an antigenic composition as described above, which is immobilized at the proximal test line. The formation of the immunocomplex between flavivirus antibody, labeled (e.g., gold-conjugated) detector reagent, and immobilized antigenic composition can be detected by the appearance of a visible line at the proximal test line, which results from the accumulation of the label (e.g., gold) in the localized region of the proximal test line. The control line may contain an immobilized, detector-reagent-specific binding partner, which can bind the detector reagent in the presence or absence of the analyte. Such binding at the control line indicates proper performance of the test, even in the absence of the analyte of interest.

[0309] The particular materials used in a particular lateral flow device will depend on a number of variables, including, for example, the analyte to be detected, the sample volume, the desired flow rate and others. In some embodiments, the sample pad receives the sample, and may serve to remove particulates from the sample. In some embodiments, the sample pad is cellulose. Sample pads may be treated with one or more release agents, such as buffers, salts, proteins, detergents, and surfactants. Such release agents may be useful, for example, to promote resolubilization of conjugate-pad constituents, and to block non-specific binding sites in other components of a lateral flow device, such as a nitrocellulose membrane. Representative release agents include, for example, trehalose or glucose (1%-5%), PVP or PVA (0.5%-2%), Tween 20 or Triton X-100 (0.1%-1%), casein (1%-2% o/), SDS (0.02%-5%), and PEG (0.02%-5%).

[0310] The conjugate pad holds a detector reagent. In some embodiments, a detector reagent may be applied externally, for example, from a developer bottle, in which case a lateral flow device need not contain a conjugate pad (see, for example, U.S. Pat. No. 4,740,468). Detector reagent(s) contained in a conjugate pad is typically released into solution upon application of the test sample. A conjugate pad may be treated with various substances to influence release of the detector reagent into solution. For example, the conjugate pad may be treated with PVA or PVP (0.5% to 2%) and/or Triton X-100 (0.5%). Other release agents include, without limitation, hydroxypropylmethyl cellulose, SDS, Brij and 3-lactose.

[0311] The absorbent pad acts to increase the total volume of sample that enters the device. This increased volume can be useful, for example, to wash away unbound analyte from the membrane. Any of a variety of materials is useful to prepare an absorbent pad. In some device embodiments, an absorbent pad can be paper (i.e., cellulosic fibers). One of skill in the art may select a paper absorbent pad on the basis of, for example, its thickness, compressibility, manufacturability, and uniformity of bed volume. The volume uptake of an absorbent made may be adjusted by changing the dimensions (usually the length) of an absorbent pad.

[0312] A wide variety of detectable labels are useful with the assays described above in addition to the described enzymatic labels.

[0313] In another embodiment, the detectable label may be a gold or silver nanoparticle that can be enhanced with non-enzymatic silver deposition (SilverQuant™). Methods for detection with silver or gold nanoparticles are described in detail in U.S. Pat. No. 7,321,829, incorporated by reference herein its entirety, as well as in US PUBL. 20090253586, also incorporated herein by reference in its entirety.

[0314] In another embodiment, the detectable label may be a Proximity Ligation Assay (PLA) reagent. Proximity ligation assay (PLA) is an approach for protein quantitation that can use two different binder molecules (proximity probes) to bind to a specific detection target (See for example Fredriksson, S. et al., Nat Biotechnol. 2002; 20(5): 473-77, Gullberg, M, et. al., Proc Natl Acad Sci USA. 2004; 101(22): 8420-24, Gullberg, M., et. al., Curr Opin Biotechnol. 2003; 14: 1-5, Pai, S., Ellington, A. D. and Levy, M., Nuc Acids Res. Oct. 19 2005; 33(18): e162, Landegren, U. and Fredriksson, S., US Patent Application 20020064779, May 30, 2002, Fredriksson, S., US Patent Application 20050003361, all pof which are incorporated by reference herein in their entirety. Typical binders include polyclonal or monoclonal antibody pairs. Each binder molecule can be conjugated to a specific oligonucleotide. One binder's oligonucleotide can form the “left” side of a real-time PCR amplicon, while the other binder can form the “right” side. When the two binders find and attach to the same target, the left and right oligomers are brought into close proximity. With the addition of a connector oligonucleotide (splint) and ligase enzyme, the left and right oligomers can become ligated and thereby allow for the formation of a complete target for a real-time PCR. Further addition of Taqman reaction components followed by thermocycling generates real-time sequence detection data output.

[0315] In another embodiment, the detectable label may be a radiolabel, and the assay termed a radioimmunoassay (RIA), as is well known in the art. The radioisotope can be detected by a gamma counter, a scintillation counter or by autoradiography. Isotopes which are particularly useful for the purpose of the present invention are ¹²⁵I, ¹³¹I, ³⁵S, ³H and ¹⁴C.

[0316] It is also possible to label the antigen or antibody reagents with a fluorophore. When the fluorescently labeled antibody is exposed to light of the proper wave length, its presence can then be detected due to fluorescence of the fluorophore. Among the most commonly used fluorophores are fluorescein isothiocyanate, rhodamine, phycoerythrin, phycocyanin, allophycocyanin, o-phthaldehyde, fluorescamine or fluorescence-emitting metals such as ¹⁵²Eu or other lanthanides. These metals are attached to antibodies using metal chelators.

[0317] The antigen or antibody reagents useful in the present invention also can be detectably labeled by coupling to a chemiluminescent compound. The presence of a chemiluminescent-tagged antibody or antigen is then determined by detecting the luminescence that arises during the course of a chemical reaction. Examples of useful chemiluminescent labeling compounds are luminol, isoluminol, theromatic acridinium ester, imidazole, acridinium salt and oxalate ester. Likewise, a bioluminescent compound such as a bioluminescent protein may be used to label the antigen or antibody reagent useful in the present invention. Binding is measured by detecting the luminescence. Useful bioluminescent compounds include luciferin, luciferase and aequorin.

[0318] Detection of the detectably labeled reagent according to the present invention may be accomplished by a scintillation counter, for example, if the detectable label is a radioactive gamma emitter, or by a fluorometer, for example, if the label is a fluorophore. In the case of an enzyme label, the detection is accomplished by colorimetry to measure the colored product produced by conversion of a chromogenic substrate by the enzyme. Detection may also be accomplished by visual comparison of the colored product of the enzymatic reaction in comparison with appropriate standards or controls.

[0319] In some embodiments, the one or more of the peptides or conjugates described above (alone or in combination) are used as an antigen stimulation mixture for cell based assays including, but not limited to, cytokine release assays (particularly interferon gamma release and interleukin 12) as measured by ELISA, Elispot, or bead based methods. In other embodiments, the peptides or conjugates described above (alone or in combination) are used in T-cell capture assays. In still other embodiments, the peptides or conjugates described above (alone or in combination) are used as an antigenic substitute for tuberculin in the tuberculin skin test (TST).

[0320] Immunovigilance:

[0321] In a different embodiment of the present invention, the mapping of specific B cell and T cell epitopes is important to managing and understanding the Zika epidemic spread. The recognition that minor amino acid changes can generate novel epitope mimics means that ongoing vigilance the virus is needed to determine if any new epitope characteristics appear or disappear. This can be done by comparison of sequences for the location of B and T cell epitopes and the absence of possibly suppressive T cell motifs. By hierarchical clustering of sequences with those collected to date any new immunological outliers can be detected. It will be appreciated that for an infection whose primary clinical manifestation is autoimmune, rapid detection of new or changing epitopes is of the upmost importance.

[0322] In some embodiments, the present invention provides linkage of epitope mimics to intrauterine pathology. In some embodiments, the present invention provides epitopes that find use in research applications (e.g., to further understanding of pathology of GBS).

[0323] Surrogate Markers and Diagnostics:

[0324] The clinical manifestations of Zika infection include neuropathologies that may be detected some time after the initial viral infection. This includes GBS and other neural deficits detected in the weeks following acute infection. It also includes the array of teratologic neural abnormalities referred to as Zika fetal syndrome, which only become apparent on ultrasound or on the birth of the child. It is likely that further consequences of Zika fetal syndrome are detected as the children infected in utero grow up. This is the case in rubella infections. Given the delay to detection of such signs it is useful to have an indicator which can anticipate which individuals may be affected. Detection of antibodies to the human neurologic proteins bearing the mimics provides such a surrogate marker or indicator. Therefore, one embodiment of the present invention is the provision of synthetic versions of the neurologic proteins and control versions of the same in which the mimic motifs have been mutated or replaced. This enables the determination of antibodies which bind to the mimic epitopes of concern. Such synthetic polypeptides may be derived from NPY or from NAV2 or from any other human protein which carries a mimic with which anti Zika antibodies react. Such synthetic polypeptides may be included in an assay format for detection of serum antibodies. The assay format may be any format known to those skilled in the art including but not limited to Western blots, ELISA, gel diffusion, dot blots or others.

[0325] Endemnicity of Zika Compared to Malaria:

[0326] In conducting a bioinformatics analysis of ZIKV and other closely related flaviviruses to identify peptides that are B cell epitopes which may serve in differential diagnosis between the co-endemic flaviviruses, we also examined the potential cross reactivity with other pathogens. A high degree of B cell epitope identity with Plasmodium falciparum was noted indicative of probable cross reactivity. This was found in both envelope and NS1 proteins and was identified as to the specific sequences which have matching B cell epitopes, as further described in the Examples. When a similar comparison was conducted for P. vivax a similar number of potential cross reactive B cell epitopes was identified, in different proteins from those identified in P. falciparum. Particularly noticeable in the case of the B cell epitope matches between ZIKV and P falciparum was that P falciparum B cell epitopes occurred in erythrocyte and liver stage antigens of the malaria parasite, some of which are under investigation as potential malaria vaccines [45]. The presence of cross reactions between Zika NS1 and malaria was noted in a comment in Eurosurveillance [46] as a potential complication in interpretation of the Euroimmun diagnostic test.

[0327] A comparison of the maps of P. falciparum distribution both in Brazil and globally makes abundantly clear that severe Zika disease is occurring where malaria is absent (FIG. 4). Both malaria and ZIKV are transmitted by Aedes mosquitoes. A similar, but less exact, pattern of overlap occurs with P vivax. Where malaria is present, severe cases of Zika are not reported. This includes Haiti and the Dominican Republic. Conversely malaria is absent from Martinique. Comparison of the distribution of malaria and Zika in Colombia based on the weekly health statistics bulletin (Boletin Epidemiológico Semanal Number 27, 3 Jul. 2016) shows also that departments where malaria transmission is active (primarily on the Pacific coast) have the lowest incidence of Zika, which is most prevalent in the low malaria north eastern Atlantic coastal region. GBS cases have been reported disproportionately on the northern Atlantic coast of Colombia [25].

[0328] B cell epitopes are bound by B cell receptors and by specific antibody variable regions. Recent work has determined that the binding of an antibody variable region or B cell receptor depends on a span of five amino acids [47]. The strategy developed and demonstrated herein for identifying B cell epitopes shared between Zika and other flaviviruses and Plasmodium therefore depends on identifying identical pentamers located in high probability B cell binding sequences. The probability of occurrence of any one B cell pentamer occurring in a protein is 20⁵ or 1 in 3.2 million possible pentamer configurations. Thus, finding a matching pentamer in two independent proteins is 3.2 million×3.2 million or 1 in 10¹². In one particular embodiment, a hexamer peptide B cell epitope of the liver specific protein of P. falciparum (Pf3D7_1418100 LISP) matches a B cell epitope in the DE loop of Envelope domain Ill of Zika virus. A hexamer match is a rare chance of 4 in 1015. This Zika loop coincides with the protective epitope previously identified [48]. Another such hexamer match is found in the Domain I Zika envelope protein with PF3D7_1408700 conserved Plasmodium protein.

[0329] In one series of embodiments of the present invention, therefore, we identify B cell epitopes of malaria proteins which are identical with B cell epitopes of Zika virus. Some of these correspond to epitopes on Zika envelope identified herein as eliciting protective antibodies and subsequently confirmed by others [48] and which can therefore provide cross protection. In some particular embodiments, these epitopes are in Plasmodium falciparum proteins; in yet others they are in P. vivax proteins. Another embodiment arising from this is a vaccine which comprises polypeptides or peptides from Plasmodium as an immunogen component of a vaccine intended to protect from Zika infection and/or disease.

[0330] A concern with Zika disease is that the GBS autoimmune disease and other manifestations of clinical disease such as thrombocytopenia [39] may be driven by antibodies to epitope mimics matching human proteome proteins. A particular advantage of the use of malaria peptides and polypeptides is that they may offer protection, while not simultaneously providing flanking peptides which may elicit autoimmune antibodies. In one embodiment of the present invention we identify malaria peptides which avoid particular epitope mimics in the human proteome and provide compositions for use as ZIKV preventive vaccines.

[0331] A further concern in flavivirus pathology is that sub neutralizing antibodies have been linked to enhanced virus titers on exposure to a second related flavivirus infection. This occurs between two dengue infections of different serotypes and between dengue and ZIKV [37]. Much of the ADE has been traced to a region of the envelope protein known as the fusion loop [4] forming the tip of the Domain 2 of the envelope. A peptide sequence DRGWGN that contributes to this epitope in flaviviruses is absent from Plasmodium falciparum and P. vivax. This provides the opportunity, in one embodiment herein, to define immunogenic peptides or polypeptides of malaria proteins which avoid causing ADE. In yet another embodiment it allows differential diagnosis of flavivirus infections from malaria, given the absence from Plasmodium of the peptide motifs in flavivirus fusion loop which generate cross reactive antibodies common to dengue, ZIKV and Yellow fever. The two safety features cited above, avoidance of autoimmune mimics and ADE, are of particular importance in designing a vaccine.

[0332] In a further set of embodiments of the present invention, we identify a diagnostic strategy which considers the cross reactivity of Plasmodium in design of a diagnostic kit for Zika.

[0333] While the specific examples that follow in relation to Plasmodium mimics apply initially to Zika this is not intended to be restrictive as a similar overlap of B cell epitopes is identified for dengue and yellow fever and in further embodiments will allow design of vaccine polypeptides and peptides and diagnostic strategies for these flaviviruses also.

[0334] B Cell Elimination:

[0335] The adverse effects resulting from antibodies from Zika virus exposure which are directed to a human neurologic protein, or from dengue exposure, which are directed to a mimic epitope matching an epitope in a human protein of cardiovascular function, or indeed from autoimmune antibodies arising from any flavivirus exposure, may be mitigated by prior vaccination with a vaccine in which the epitopes of interest are mutated, or the antibodies may be reduced by plasmapheresis. During plasmapheresis, blood (which consists of blood cells and a clear liquid called plasma) is initially taken out of the body through a needle or previously implanted catheter. Plasma is then removed from the blood by a cell separator. In order to remove autoantibodies to Zika epitopes, blood plasma is removed and exchanged with blood products to be donated to the recipient. This type of plasmapheresis is called plasma exchange (PE or PEX) or plasma exchange therapy (PET). The removed plasma is discarded and the patient receives replacement donor plasma, albumin, or a combination of albumin and saline (usually 700% albumin and 30% saline). In some embodiments, auto-antibodies are removed from the isolated plasma by filtration on a specific substrate (e.g., comprising a peptide described herein). In some embodiments, a column is attached to the plasma line, selectively eliminating the pathogenic autoantibody and returning the patient's own plasma. Any suitable substrate may be utilized in plasamapheresis (e.g., particle, bead, filter, resin, etc.)

[0336] However, a concern remains that as long as the B cell clonal populations which secrete the mimic-binding antibodies remain in the body, they may continue to secrete the antibodies and the clonal populations may expand again on re-exposure to the virus. In these circumstances, it may be useful to abrogate those B cell clonal lines which are generating the antibodies specific for these mimic epitopes. This can be achieved by “baiting” the B cells with the epitope mimic peptides fused to a cytocide or cytotoxin, so that as B cells specifically bind and incorporate the peptide they are also specifically exposed to the lethal cytocide or cytotoxin, many of which are known to those skilled in the art but which include RNAses (e.g., RNase A, RNase H, RNase III, RNase L, RNase P, RNase PhyM, RNase T1, RNase T2, RNase U2, and RNase V i), membrane active peptides (e.g., amyloid peptides, antimicrobial peptides, and cell-penetrating peptides), and diphtheria toxin. See also, WO 2010/083225, herein incorporated by reference in its entirety. Cytotoxins may also include radioactive alpha emitters or auger particles. In a particular embodiment herein therefore, the epitope peptide identified in the flavivirus is operatively linked to a cytotoxin or cytocide and administered to an affected subject.

### EXPERIMENTAL

[0337] The following examples are provided in order to demonstrate and further illustrate certain preferred embodiments and aspects of the present invention and are not to be construed as limiting the scope thereof.

### Example 1

[0338] Identification of Epitopes Unique to American Zika Virus and Comparison to Dengue and Yellow Fever.

[0339] Rapid immunoinformatic analysis of the envelope protein of Zika, from ZikaSPH2015 (KU321639), indicates predicted B and T cell epitopes in peptides that are structurally consistent to those reported for dengue, YF and JEV (FIG. 5). The envelope protein Domain II B cell epitope DRGWGNG at 97-103 aa position, to which much dengue non-neutralizing cross reaction is attributed [4], is conserved also in ZIKV, consistent with prior field observations of cross reactivity with dengue and YF. This B cell epitope overlaps a conserved T cell exposed motif (G˜˜G˜G˜LV) shared by ZIKV and dengue virus 3, which is predicted to be bound at high affinity by DQ alleles. This is a common immunoglobulin-like MHC II motif is present in 1 in 64 antibody variable regions [49]. Domain I of Zika, likely the main neutralizing domain, is distinct from recent Brazilian dengue isolates. When compared with recent Brazilian dengue 1-4 isolates (GQ330473, HQ184924, JF808120, JN848496, JQ513335, KP858105, KP858119, HQ184925, JN848499, KP858111) and a recent Peruvian YF isolate (GQ379163), 76% of possible MHCI and MHC II binding peptides are unique to ZIKV. Related to this, the patterns of similarity of T and B cell motifs with the human proteome differs in ZIKV, indicating a potentially different pattern of epitope mimics from dengue. Analysis of these motifs identified proteins of the human proteome critical to neurologic development which share pentamer motifs with ZIKV. When envelopes of 35 strains of Zika from around the world are compared [19, 50], the Cook Island and Brazilian isolates stand apart from two clusters of African isolates, based on analysis of B cell linear epitopes and predicted MHC II binding (FIG. 6).

### Example 2 Identification of Epitope Mimics in Zika Virus Structural Proteins

[0340] Following computation of master matrices of B cell and MHC binding predictions as previously described (PCT US2011/029192, PCT US2012/055038, and US2014/01452, each of which is incorporated herein by reference) a subset of peptides was identified which has predicted binding to B cell epitopes in the top 25%, ie those with binding of less than −0.6 standard deviation units below the mean for the protein. Peptides selected were pentamers, which is a conservative filter as B cells may bind to as few as 3 amino acids. This set of pentamers was joined to a precomputed database of pentamers in the human proteome (over 33 million peptides). This was in turn compiled with a list of Uniprot identities. The resulting subset of ˜2700 proteins was manually curated and searched using a key term search for proteins curated as containing “neur” “glial” and “synap”. A subset of proteins with neural function and match of pentamers to Zika B cell epitopes was thus arrived at Table 1.

TABLE 1

| | | | | Zika Env |
|---|---|---|---|---|
| | Pentamer | | Other | aa |
| | motif | Protein ID in Human proteome | flavi? | position |
| SEQ 1 | PVITE | E7EMY4_HUMAN Neural cell adhesion molecule L1 (Fra | 0 | 364 |
| SEQ 2 | EGAVH | E7EP46_HUMAN Neurotrophin-4 OS = Homo sapiens | 0 | 263 |
| SEQ 3 | STENS | E7EP46_HUMAN Neurotrophin-4 OS = Homo sapiens | 0 | 369 |
| SEQ 4 | PVITE | E7EPI4_HUMAN Neural cell adhesion molecule L1 (Fra | 0 | 364 |
| SEQ 5 | PVITE | E7EVM4_HUMAN Neural cell adhesion molecule L1 (Fra | 0 | 364 |
| SEQ 6 | PVITE | E9PHJ4_HUMAN Neural cell adhesion molecule L1 (Fra | 0 | 364 |
| SEQ 7 | KGRLS | E9PNV5_HUMAN Neuron navigator 2 (Fragment) | 1 | 282 |
| SEQ 8 | PVITE | F5H025_HUMAN Neural cell adhesion molecule L1 | 1 | 364 |
| SEQ 9 | PVITE | F5H1H0_HUMAN Neural cell adhesion molecule L1 | 1 | 364 |
| SEQ 10 | PVITE | L1CAM_HUMAN Isoform 2 of Neural cell adhesion mole | 1 | 364 |
| SEQ 11 | PVITE | L1CAM_HUMAN Isoform 3 of Neural cell adhesion mole | 1 | 364 |
| SEQ 12 | PVITE | L1CAM_HUMAN Neural cell adhesion molecule L1 | 1 | 364 |
| SEQ 13 | AGADT | M0QX38_HUMAN Neurogenic locus notch homolog | 1 | 228 |
| SEQ 14 | KGRLS | NAV2_HUMAN Isoform 10 of Neuron navigator 2 | 1 | 282 |
| SEQ 15 | KGRLS | NAV2_HUMAN Isoform 11 of Neuron navigator 2 | 1 | 282 |
| SEQ 16 | KGRLS | NAV2_HUMAN Isoform 12 of Neuron navigator 2 | 1 | 282 |
| SEQ 17 | KGRLS | NAV2_HUMAN Isoform 13 of Neuron navigator 2 | 1 | 282 |
| SEQ 18 | KGRLS | NAV2_HUMAN Isoform 2 of Neuron navigator 2 | 1 | 282 |
| SEQ 19 | KGRLS | NAV2_HUMAN Isoform 3 of Neuron navigator 2 | 1 | 282 |
| SEQ 20 | KGRLS | NAV2_HUMAN Isoform 4 of Neuron navigator 2 | 1 | 282 |
| SEQ 21 | KGRLS | NAV2_HUMAN Isoform 5 of Neuron navigator 2 | 1 | 282 |
| SEQ 22 | KGRLS | NAV2_HUMAN Isoform 8 of Neuron navigator 2 | 1 | 282 |
| SEQ 23 | KGRLS | NAV2_HUMAN Isoform 9 of Neuron navigator 2 | 1 | 282 |
| SEQ 24 | KGRLS | NAV2_HUMAN Neuron navigator 2 OS = Homo sapiens | 1 | 282 |
| SEQ 25 | ATLGG | NCAM1_HUMAN Isoform 3 of Neural cell adhesion mol | 0 | 179 |
| SEQ 26 | ATLGG | NCAM1_HUMAN Isoform 4 of Neural cell adhesion mol | 0 | 179 |
| SEQ 27 | LSSGH | NDF4_HUMAN Neurogenic differentiation factor 4 OS = | 0 | 285 |
| SEQ 28 | GGALN | NOTC1_HUMAN Neurogenic locus notch homolog | 1 | 436 |
| SEQ 29 | QPENL | NOTC2_HUMAN Neurogenic locus notch homolog | 0 | 132 |
| SEQ 30 | AGADT | NOTC3_HUMAN Neurogenic locus notch homolog | 1 | 228 |
| SEQ 31 | ESTEN | NPY_HUMAN Pro-neuropeptide Y OS = Homo sapiens | 1 | 368 |
| SEQ 32 | AGTDG | NUFP2_HUMAN Nuclear fragile X mental retardation-i | 0 | 230 |
| SEQ 33 | ATLGG | R4GMN9_HUMAN Neural cell adhesion molecule 1 | 0 | 179 |
| SEQ 34 | RAEAT | SNP29_HUMAN Synaptosomal-associated protein 29 | 0 | 176 |

Column 3 indicates whether the same protein (by different motifs) is matched in other flaviruses, 1 = yes

[0341] The same process was repeated for the envelopes of 18 flaviviruses comprising those shown in Table 2 which includes 15 non Zika viruses.

TABLE 2

| | Gi or |
|---|---|
| Flavivirus | accession number |
| Zika - SPH2015 Brazil | 969945757 |
| Zika - Cook Islands 631250743 | 631250743 |
| Zika - ArD158084 Senegal | 592746966 |
| Dengue 3 and 4 (2 each) recent wildtypes | GQ330473 JF808120 |
| from Brazil | JN848496 JQ513335 |
| Dengue 1 and 2 (2 each, partial env) | HQ184924 KP858105 |
| recent wildtypes from Brazil | KP858119 HQ184925 |
| Yellow fever - 2007 Peru wildtype isolate | GQ379163 |
| YF 17D vaccine strain | 130490 |
| Dengue 1 and 2 reference strains | 119364637 and 266813 |
| (not South American) | |
| WNV | 37999909 |
| JEV | 130490 |
| TBEV | 6226885 |

[0342] In addition to identifying neural matches, a comparison of pentamer usage among the 18 flavivirus envelopes confirmed that of 8505 unique pentamers, 1144 were found exclusively in the 3 Zika viruses and that the distribution of unique motifs was as shown in Table 3 and the sharing patterns are shown in FIG. 7.

TABLE 3

| Unique | Zika | Zika | Zika |
|---|---|---|---|
| pentamer | Senegal | Cook Is | Brazil |
| 329 | + | + | + |
| 45 | + | − | − |
| 48 | − | + | + |
| 5 | − | − | + |

Isolate identities as in Table 2

[0343] Among the flaviviruses that are not Zika viruses, additional neural matches were found as shown in Table 4. Some pentamer matches occurred in multiple flaviviruses (score not shown in Table 4)

TABLE 4

| | pentamer | Human protein id |
|---|---|---|
| SEQ 35 | AGADT | M0QX38_HUMAN Neurogenic locus notch, homolog protei |
| SEQ 36 | AGADT | NOTC3_HUMAN Neurogenic locus notch homolog protein |
| SEQ 37 | DGSPC | NOTC3_HUMAN Neurogenic locus notch homolog protein |
| SEQ 38 | GEDAP | NPY_HUMAN Pro-neuropeptide Y OS = Homo sapiens GN = NP |
| SEQ 39 | GNETT | F5H025_HUMAN Neural cell adhesion molecule L1 OS = H |
| SEQ 40 | GNETT | F5H1H0_HUMAN Neural cell adhesion molecule L1 OS = H |
| SEQ 41 | GNETT | L1CAM_HUMAN Isoform 2 of Neural cell adhesion mole |
| SEQ 42 | GNETT | L1CAM_HUMAN isoform 3 of Neural cell adhesion mole |
| SEQ 43 | GNETT | L1CAM_HUMAN Neural cell adhesion molecule L1 OS = Ho |
| SEQ 44 | KCPST | F5H804_HUMAN Nuclear protein MDM1 OS = Homo sapiens |
| SEQ 45 | KNPVD | F5H025_HUMAN Neural cell adhesion molecule L1 OS = H |
| SEQ 46 | KNPVD | F5H1H0_HUMAN Neural cell adhesion molecule L1 OS = H |
| SEQ 47 | KNPVD | L1CAM_HUMAN Isoform 2 of Neural cell adhesion mole |
| SEQ 48 | KNPVD | L1CAM_HUMAN Isoform 3 of Neural cell adhesion, mole |
| SEQ 49 | KNPVD | L1CAM_HUMAN Neural cell adhesion molecule L1 OS = Ho |
| SEQ 50 | LKGTT | NOTC1_HUMAN Neurogenic locus notch homolog protein |
| SEQ 51 | STTLK | F5H025_HUMAN Neural cell adhesion molecule L1 OS = H |
| SEQ 52 | STTLK | F5H1H0_HUMAN Neural cell adhesion molecule L1 OS = H |
| SEQ 53 | STTLK | L1CAM_HUMAN Isoform 2 of Neural cell adhesion mole |
| SEQ 54 | STTLK | L1CAM_HUMAN Isoform 3 of Neural cell adhesion mole |
| SEQ 55 | STTLK | L1CAM_HUMAN Neural cell adhesion molecule L1 OS = Ho |
| SEQ 56 | TDKEK | E9PNV5_HUMAN Neuron navigator 2 (Fragment) OS = Hom |
| SEQ 57 | TDKEK | NAV2_HUMAN Isoform 10 of Neuron navigator 2 OS = Hom |
| SEQ 58 | TDKEK | NAV2_HUMAN Isoform 11 of Neuron navigator 2 OS = Hom |
| SEQ 59 | TDKEK | NAV2_HUMAN Isoform 12 of Neuron navigator 2 OS = Hom |
| SEQ 60 | TDKEK | NAV2_HUMAN Isoform 13 of Neuron navigator 2 OS = Hom |
| SEQ 61 | TDKEK | NAV2_HUMAN Isoform 2 of Neuron navigator 2 OS = Homo |
| SEQ 62 | TDKEK | NAV2_HUMAN Isoform 3 of Neuron navigator 2 OS = Homo |
| SEQ 63 | TDKEK | NAV2_HUMAN Isoform 4 of Neuron navigator 2 OS = Homo |
| SEQ 64 | TDKEK | NAV2_HUMAN Isoform 5 of Neuron navigator 2 OS = Homo |
| SEQ 65 | TDKEK | NAV2_HUMAN Isoform 8 of Neuron navigator 2 OS = Homo |
| SEQ 66 | TDKEK | NAV2_HUMAN Isoform 9 of Neuron navigator OS = Homo |
| SEQ 67 | TDKEK | NAV2_HUMAN Neuron navigator 2 OS = Homo sapiens GN = N |
| SEQ 68 | TPQAP | NAV2_HUMAN Isoform 10 of Neuron, navigator 2 OS = Hom |
| SEQ 69 | TPQAP | NAV2_HUMAN Isoform 11 of Neuron navigator 2 OS = Hom |
| SEQ 70 | TPQAP | NAV2_HUMAN Isoform 12 of Neuron navigator 2 OS = Hom |
| SEQ 71 | TPQAP | NAV2_HUMAN Isoform 13 of Neuron navigator 2 OS = Hom |
| SEQ 72 | TPQAP | NAV2_HUMAN Isoform 2 of Neuron navigator 2 OS = Homo |
| SEQ 73 | TPQAP | NAV2_HUMAN Isoform 3 of Neuron navigator 2 OS = Homo |
| SEQ 74 | TPQAP | NAV2_HUMAN Isoform 4 of Neuron navigator 2 OS = Homo |
| SEQ 75 | TPQAP | NAV2_HUMAN Isoform 8 of Neuron navigator 2 OS = Homo |
| SEQ 76 | TPQAP | NAV2_HUMAN Isoform 9 of Neuron navigator 2 OS = Homo |
| SEQ 77 | TPQAP | NAV2_HUMAN Neuron navigator 2 OS = Homo sapiens |

[0344] While there is considerable commonality between the proteins in which matches occur in ZIKVa vs other flaviviruses, the actual pentamers and their positions in both virus and target human protein was different. Each motif and the associated epitope context was examined in both source (virus) and target (human neural protein). Most consideration was given to those which match a B cell epitope in the target protein as well as a B cell epitope in the source. Each neural protein was mapped, as were the envelope proteins. The associated MHC binding in the source viral protein was reviewed as an indicator of how strong an antibody response may be stimulated due to more/less T helper cells.

[0345] As an example of the findings, both dengue 3 and ZIKV have peptides which match a counterpart target motif in NPY. Coincidentally the dengue pentamer ˜GEDAP˜ is only found in dengue 3 isolates of >400 dengue isolates since 2005 from S America that we queried, not in other dengue types. The comparative features are shown in Table 5.

TABLE 5

| | Virus | Virus | BEPI | | | |
|---|---|---|---|---|---|---|
| | pentamer | Envelope | strength in | MHC II in | NPY | |
| Virus | motif | position | Source virus | Source virus | position | NPY Bepi? |
| Zika (all | ~ESTEN~ | 368, Domain | Moderate | Very Strong | Position 86 | yes |
| isolates) | | III loop5* | | all DRB and | BEPI centerd | |
| | | | | DP and DQ | at position 88 | |
| | | | | alleles | In CONAP C | |
| | | | | | terminal peptide | |
| Dengue (only | ~GEDAP~ | 328, Domain | Moderate | Weak except | Position 42, | Yes |
| DEN3 | | III loop4* | | for DRB1: 0404 | BEPI centered | |
| | | | | and DRB1: 1101 | at 44. In helical | |
| | | | | | mature peptide | |

*envelope aa positions based on GenPep indications of regions in polyprotein.

[0346] FIG. 9 shows the epitope map of NPY, showing that the two pentamers are both in B cell epitopes but in different places. GDAP lies in the helical portion of NPY whereas ESTEN is in the CONAP C terminal section [51]. Both peptide segments of the propeptide are active in neural development and many functions including retinal health [52]. FIG. 8 shows the position in the envelope domain III based on the JEV structural model [12]. FIGS. 10 and 11 shows the position of the neural matched motifs in Den 3 and in Zika envelopes. We further checked the occurrence of pentamer ESTEN in other infectious agents via BLAST, finding no hits; peptide ESTEN is a useful marker for ZIKV.

[0347] Similar comparative analysis of other neural proteins indicates that those specific to ZIKV may also play a contributing role in the pathogenesis. In one case, the pentamer PVITE overlaps with ESTEN and benefits from the same strong T cell helper response. PVITE finds an epitope mimic in LCAM1 neural adhesion molecules.

[0348] One other area of the envelope sequence merited particular consideration as it was noted that the sequence with peptides initiating in positions 260-273 has a very high content of motifs with homologues in the human proteome. This region is a relatively weak B cell epitope. One neural match EGAVH was found for an epitope centered at position 263. However additional peptides in this region showed mimic-matches with Glial fibrillary acid protein (GFAP) and with Glycoprotein M6A (GPM6a), proteins with important roles in neural development. GFAP has been identified as a protein to which antibodies are found in the axonal form of GBS. and GPM6a plays a role in migration and differentiation of neurons. The corresponding pentamers are shown in Table 6

TABLE 6

| | | |
|---|---|---|
| SEQ 78 | LAGAL | GFAP_HUMAN Isoform |
| | | 2 of Glial fibrillary acidic protein |
| SEQ 79 | ALAGA | NEURONAL MEMBRANE |
| | | GLYCOPROTEIN M6-a |

[0349] Mimics of other neural proteins are found in the ZIKV capsid and PrM protein as shown in Table 6. However, these proteins are in fewer copy numbers in each virion and are partly concealed to the B cells by the outer layer of envelope proteins, so are less likely candidates to play a role in autoimmune pathogenensis.

TABLE 7
Capsid protein-pentamer BEPI motifs in Zika capsids
unique to Zika vs other flaviviruses.

| | | |
|---|---|---|
| SEQ 80 | KKEAM | A3KFI4_HUMAN Neuroblastoma suppressor of tumorigen |
| SEQ 81 | KKEAM | A3KFI5_HUMAN Neuroblastoma suppressor of tumorigen |
| SEQ 82 | EAMEI | ESYT2_HUMAN Isoform 4 of Extended synaptotagmin-2 |
| SEQ 83 | EAMEI | ESYT2_HUMAN Isoform 5 of Extended synaptotagmin-2 |
| SEQ 84 | EAMEI | ESYT2_HUMAN Isoform 6 of Extended synaptotagmin-2 |
| SEQ 85 | EAMEI | ESYT3_HUMAN Extended synaptotagmin-3 OS = Homo sapie |
| SEQ 86 | EAMEI | ESYT3_HUMAN Isoform 2 of Extended synaptotagmin-3 |
| SEQ 87 | RKEKK | A6NCR3_HUMAN Synaptopodin 2-like protein |
| SEQ 88 | RKEKK | A6NCR4_HUMAN Synaptotagmin-8 OS = Homo sapiens |
| SEQ 89 | RKEKK | NBPFL_HUMAN Neuroblastoma breakpoint family member |
| SEQ 90 | KEKKR | A2BH96_HUMAN Neuroblastoma breakpoint family member |
| SEQ 91 | KEKKR | A3KFI1_HUMAN Neuroblastoma suppressor of tumorigen |
| SEQ 92 | KEKKR | NBAS_HUMAN Isoform 2 of Neuroblastoma-amplified seq |
| SEQ 92 | KEKKR | NBAS_HUMAN Neuroblastoma-amplified sequence |
| SEQ 93 | EKKRR | A2A2M9_HUMAN Synaptonemal complex protein 2 |
| SEQ 94 | EKKRR | A2A340_HUMAN Synaptonemal complex protein 2 |
| SEQ 95 | EKKRR | A2A341_HUMAN Synaptonemal complex protein 2 |
| SEQ 96 | EKKRR | A2A3C1_HUMAN Brain-specific angiogenesis inhibitor |
| SEQ 97 | EKKRR | FI68B_HUMAN Isoform 2 of Myelin-associated neurite |
| SEQ 98 | EKKRR | FI68B_HUMAN Myelin-associated neurite-outgrowth |
| SEQ 99 | RRGAD | A6NDV3_HUMAN Neuroblastoma breakpoint family member |
| SEQ 100 | GADTS | A2A3C2_HUMAN Brain-specific angiogenesis inhibitor |
| SEQ 101 | GADTS | A2A3C3_HUMAN Brain-specific angiogenesis inhibitor |
| SEQ 102 | GADTS | A2A3C4_HUMAN Brain-specific angiogenesis inhibitor |
| SEQ 103 | GADTS | A2A3C6_HUMAN Brain-specific angiogenesis inhibitor |
| SEQ 104 | ADTSV | ESYT2_HUMAN Extended synaptotagmin-2 |
| SEQ 105 | ADTSV | ESYT2_HUMAN Isoform 2 of Extended synaptotagmin-2 |
| SEQ 106 | KKEAM | A3KFI2_HUMAN Neuroblastoma suppressor of tumorigen |
| SEQ 107 | KKEAM | A3KFI3_HUMAN Neuroblastoma suppressor of tumorigen |

TABLE 8
PrM membrane protein - Pentamer BEPI motifs unique to Zika
from other Flaviviruses tested which have neural matches

| | | |
|---|---|---|
| SEQ 108 | ARRSR | H0YGA6_HUMAN Neuralized-like protein 2 (Fragment) |
| SEQ 109 | ARRSR | NEUL2_HUMAN Neuralized-like protein 2 OS = Homo sapi |
| SEQ 110 | KLQTR | SYT6_HUMAN Synaptotagmin-6 OS = Homo sapiens GN = SYT6 |
| SEQ 111 | KLQTR | SYT6_HUMAN Synaptotagmin-6 OS = Homo sapiens GN = SYT6 |
| SEQ 112 | REYTK | H0Y465_HUMAN Neurofibromin truncated (Fragment) OS |
| SEQ 113 | REYTK | NF1_HUMAN Isoform 1 of Neurofibromin OS = Homo sapie |
| SEQ 114 | REYTK | NF1_HUMAN Neurofibromin OS = Homo sapiens GN = NF1 PE= |
| SEQ 115 | REYTK | H0Y465_HUMAN Neurofibromin truncated (Fragment) OS |
| SEQ 116 | REYTK | NF1_HUMAN Isoform 1 of Neurofibromin OS = Homo sapie |
| SEQ 117 | REYTK | NF1_HUMAN Neurofibromin OS = Homo sapiens GN = NF1 PE= |
| SEQ 118 | RKLQT | LRRT2_HUMAN Leucine-rich repeat transmembrane neur |
| SEQ 119 | RKLQT | LRRT2_HUMAN Leucine-rich repeat transmembrane neur |
| SEQ 121 | SHSTR | F5GZS7_HUMAN Neuregulin-2 OS = Homo sapiens GN = NRG2 |
| SEQ 122 | SHSTR | F5H0N2_HUMAN Neuregulin-2 OS = Homo sapiens GN = NRG2 |
| SEQ 123 | SHSTR | NRG2_HUMAN Isoform 2 of Pro-neuregulin-2 |
| SEQ 124 | SHSTR | NRG2_HUMAN Isoform 3 of Pro-neuregulin-2 |
| SEQ 125 | SHSTR | NRG2_HUMAN Isoform 4 of Pro-neuregulin-2 |
| SEQ 126 | SHSTR | NRG2_HUMAN Isoform DON-1B of Pro-neuregulin-2 |
| SEQ 127 | SHSTR | NRG2_HUMAN Isoform DON-1R of Pro-neuregulin-2 |
| SEQ 128 | SHSTR | NRG2_HUMAN Pro-neuregulin-2 |
| SEQ 129 | SHSTR | F5GZS7_HUMAN Neuregulin-2 OS = Homo sapiens GN = NRG2 |
| SEQ 130 | SHSTR | F5H0N2_HUMAN Neuregulin-2 OS = Homo sapiens GN = NRG2 |
| SEQ 131 | SHSTR | NRG2_HUMAN Isoform 2 of Pro-neuregulin-2 |
| SEQ 132 | SHSTR | NRG2_HUMAN Isoform 3 of Pro-neuregulin-2 |
| SEQ 133 | SHSTR | NRG2_HUMAN Isoform 4 of Pro-neuregulin-2 |
| SEQ 134 | SHSTR | NRG2_HUMAN Isoform DON-1B of Pro-neuregulin-2 |
| SEQ 135 | SHSTR | NRG2_HUMAN Isoform DON-1R of Pro-neuregulin-2 |
| SEQ 136 | SHSTR | NRG2_HUMAN Pro-neuregulin-2 |
| SEQ 137 | TLPSH | NYAP2_HUMAN Neuronal tyrosine-phosphorylated phosp |
| SEQ 138 | TLPSH | NYAP2_HUMAN Neuronal tyrosine-phosphorylated phosp |
| SEQ 139 | ARRSR | H0YGA6_HUMAN Neuralized-like protein 2 (Fragment) |
| SEQ 140 | ARRSR | NEUL2_HUMAN Neuralized-like protein 2 OS = Homo sapi |

### Example 3. Design and Expression of Synthetic Immunogens Comprising ZIKV Polypeptides

[0350] ZIKV polypeptides of interest were identified in each domain of the envelope protein, based on the criteria that each polypeptide comprises one or more B cell epitopes and has associated predicted MHC I and MHC II binding peptides. In addition, consideration was given to the mimics identifies as described above. Vector constructs were prepared to incorporate polypeptides of Domain I, Domain II, and Domain III of the envelope protein (SEQS 141-164). Additional polypeptides were selected to exclude the mimic peptides identified (SEQ 165-168). In particular, a construct was prepared to mutate the ESTEN motif (SEQS 169-170). The vector constructs were designed to permit the expression of standalone synthetic polypeptides for each domain and additional constructs provided for the expression as a fusion protein with immunoglobulins. While the constructs shown herewith provide for fusion of immunoglobulins to the C terminal of Zika polypeptides, constructs enabling N terminal fusion were also prepared but are not shown. Constructs enabling expression of with either murine or human immunoglobulins were prepared as shown.

[0351] A further vector construct was prepared to generate expression of the 34-mer B cell epitope region sequence, GRLITANPVITESTENSKMMLELDPPFGDSYIGE, which encompasses ESTEN (SEQ 171-172). As previously described (U.S. Pat. Nos. 8,703,134; 8,394,379; 7,566,447; and 20130230516; each of which is incorporated herein by reference in its entirety) these constructs are incorporated into retroviral vectors and transfected into CHO cells to create stable expressing protein production cell lines.

[0352] A series of constructs were prepared to mutate out a mimic motif which is in Zika envelope Domain 1 and which reacts with Neural navigator proteins 2 (NAV2). The motif which forms a mimic is encoded by the pentamer KGRLS. Therefore various forms of envelope domain 1 are designed which include mutants of KGRLS and which were found not to have other kinds of mimic matches in the proteome. In addition a “triple scramble” version of the soluble portion of the whole envelope protein was prepared which mutates the KGRLS, the ESTEN motif and which in addition mutates out the peptide in Domain II thought to be associates with antibody dependent enhancement in other flavi viruses. This is at position 102 and comprises the motif DRGWGN. The sequences which embody these mutants are shown as SEQS 245-254. Many other options exist in configuring mutations or removing mimics by amino acid deletion, thus these SEQs are provided as examples and shall not be considered limiting. Throughout the application, the annotated sequences, peptides, polypeptides, nucleic acids etc., may be identified as SEQ.XXX which corresponds to SEQ ID NO:XXX in the accompanying Sequence ID Listing. For example, Seq.245 is SEQ ID NO:245 in the Sequence ID Listing.

[0353] Seq.245. His-EKL-D1-LRKGS, Nucleotide Sequence, ID:501095n

[0354] 1-69 Signal peptide

[0355] 70-87 6× Histag

[0356] 88-111 Enterokinase linker

[0357] 112-567 Domain 1 extended mutant

[0358] Seq.246. His-EKL-D1-LRKGS, Amino Acid Sequence, ID:501095p

[0359] 1-23 Signal peptide

[0360] 24-29 6× Histag

[0361] 30-37 Enterokinase linker

[0362] 38-189 Domain I extended mutant

[0363] Seq.247. His-EKL-D1-RKGLS, Nucleotide Sequence

[0364] 1-69 Signal peptide

[0365] 70-87 6× Histag

[0366] 88-111 Enterokinase linker

[0367] 112-567 Domain I extended mutant

[0368] Seq.248. His-EKL-D1-RKGLS, Amino Acid Sequence

[0369] 1-23 Signal peptide

[0370] 24-29 6× Histag

[0371] 30-37 Enterokinase linker

[0372] 38-189 Domain 1 extended mutant

[0373] Seq.249. His-EKL-D1-KGRIT, Nucleotide Sequence

[0374] 1-69 Signal peptide

[0375] 70-87 6× Histag

[0376] 88-111 Enterokinase linker

[0377] 112-567 Domain I extended mutant

[0378] Seq.250. His-EKL-D1-KGRIT, Amino Acid Sequence

[0379] 1-23 Signal peptide

[0380] 24-29 6× Histag

[0381] 30-37 Enterokinase linker

[0382] 38-189 Domain 1 extended mutant

[0383] Seq.251. His-EKL-D1-GLSKR, Nucleotide Sequence

[0384] 1-69 Signal peptide

[0385] 70-87 6× Histag

[0386] 88-111 Enterokinase linker

[0387] 112-567 Domain 1 extended mutant

[0388] Seq.252. His-EKL-D1-GLSKR, Amino Acid Sequence

[0389] 1-23 Signal peptide

[0390] 24-29 6× Histag

[0391] 30-37 Enterokinase linker

[0392] 38-189 Domain 1 extended mutant

[0393] Seq.253. His-EKL-Soluble-3Mods, Nucleotide Sequence, ID:501089n

[0394] 1-69 Signal peptide

[0395] 70-87 6× Histag

[0396] 88-111 Enterokinase linker

[0397] 112-1332 Soluble peptide mutant

[0398] Seq.254. His-EKL-Soluble-3Mods, Amino Acid Sequence, ID:501089p

[0399] 1-23 Signal peptide

[0400] 24-29 6× Histag

[0401] 30-37 Enterokinase linker

[0402] 38-444 Soluble peptide mutant

[0403] Seq.141. His-EKL-Soluble, Nucleotide Sequence, ID:501066n

[0404] 1-63 Signal peptide

[0405] 70-87 6× His Tag

[0406] 88-111 Enterokinase linker

[0407] 112-1332 soluble peptide

[0408] Seq.142. His-EKL-Soluble, Amino Acid Sequence, ID:501066p

[0409] 1-21 Signal peptide

[0410] 24-29 6× His Tag

[0411] 30-37 Enterokinase linker

[0412] 38-444 soluble peptide

[0413] Seq.143. His-EKL-Domain3, Nucleotide Sequence, ID:501067n

[0414] 1-63 Signal peptide

[0415] 70-87 6× His Tag

[0416] 88-111 Enterokinase linker

[0417] 112-429 domain3 peptide

[0418] Seq.144. His-EKL-Domain3, Amino Acid Sequence, ID:501067p

[0419] 1-21 Signal peptide

[0420] 24-29 6× His Tag

[0421] 30-37 Enterokinase linker

[0422] 38-143 domain3 peptide

[0423] Seq.145. His-EKL-Domain2, Nucleotide Sequence, ID:501068n

[0424] 1-63 Signal peptide

[0425] 70-87 6× His Tag

[0426] 88-111 Enterokinase linker

[0427] 112-375 domain2 peptide

[0428] Seq.146. His-EKL-Domain2, Amino Acid Sequence, ID:501068p

[0429] 1-21 Signal peptide

[0430] 24-29 6× His Tag

[0431] 30-37 Enterokinase linker

[0432] 38-125 domain2 peptide

[0433] Seq.147. His-EKL-Domain1, Nucleotide Sequence, ID:501069n

[0434] 1-63 Signal peptide

[0435] 70-87 6× His Tag

[0436] 88-111 Enterokinase linker

[0437] 112-339 domain1 peptide

[0438] Seq.148. His-EKL-Domain1, Amino Acid Sequence, ID:501069p

[0439] 1-21 Signal peptide

[0440] 24-29 6× His Tag

[0441] 30-37 Enterokinase linker

[0442] 38-113 domain1 peptide

[0443] Seq.149. Soluble-EKL-hG1(CH2-CH3), Nucleotide Sequence, ID:501070n

[0444] 1-63 Signal peptide

[0445] 70-1287 soluble peptide

[0446] 1288-1311 Enterokinase linker

[0447] 1318-2016 hG1(CH2-CH3) constant region

[0448] Seq.150. Soluble-EKL-hG1(CH2-CH3), Amino Acid Sequence, ID:501070p

[0449] 1-21 Signal peptide

[0450] 24-429 soluble peptide

[0451] 430-437 Enterokinase linker

[0452] 440-672 hG1(CH2-CH3) constant region

[0453] Seq.151. Domain3-EK-hG1(CH2-CH3), Nucleotide Sequence, ID:501071n

[0454] 1-63 Signal peptide

[0455] 70-384 domain3 peptide

[0456] 385-408 Enterokinase linker

[0457] 415-1113 hG1(CH2-CH3) constant region

[0458] Seq.152. Domain3-EKL-hG1(CH2-CH3), Amino Acid Sequence, ID:501071p

[0459] 1-21 Signal peptide

[0460] 24-128 domain3 peptide

[0461] 129-136 Enterokinase linker

[0462] 139-371 hG1 (CH2-CH3) constant region

[0463] Seq.153. Domain2-EKL-hG1(CH2-CH3), Nucleotide Sequence, ID:501072n

[0464] 1-63 Signal peptide

[0465] 70-330 domain2 peptide

[0466] 331-354 Enterokinase linker

[0467] 361-1059 hG1 (CH2-CH3) constant region

[0468] Seq.154. Domain2-EKL-hG1(CH2-CH3), Amino Acid Sequence, ID:501072p

[0469] 1-21 Signal peptide

[0470] 24-110 domain2 peptide

[0471] 111-118 Enterokinase linker

[0472] 121-353 hG1(CH2-CH3) constant region

[0473] Seq.155. Domain1-EKL-hG1(CH2-CH3), Nucleotide Sequence, ID:501073n

[0474] 1-63 Signal peptide

[0475] 70-294 domain1 peptide

[0476] 295-318 Enterokinase linker

[0477] 325-1023 hG1(CH2-CH3) constant region

[0478] Seq.156. Domain1-EKL-hG1(CH2-CH3), Amino Acid Sequence, ID:501073p

[0479] 1-21 Signal peptide

[0480] 24-98 domain1 peptide

[0481] 99-106 Enterokinase linker

[0482] 109-341 hG1(CH2-CH3) constant region

[0483] Seq.157. His-Soluble-EKL-mG2a(CH2-CH3), Nucleotide Sequence, ID:501074n

[0484] 1-63 Signal peptide

[0485] 70-87 6× Histag

[0486] 88-1305 soluble peptide

[0487] 1306-1329 Enterokinase linker

[0488] 1336-2037 mG2a(CH2-CH3) constant region

[0489] Seq.158. His-Soluble-EKL-mG2a(CH2-CH3), Amino Acid Sequence, ID:501074p

[0490] 1-21 Signal peptide

[0491] 24-29 6× Histag

[0492] 30-435 soluble peptide

[0493] 436-443 Enterokinase linker

[0494] 446-679 mG2a(CH2-CH3) constant region

[0495] Seq.159. His-Domain3-EKL-mG2a(CH2-CH3), Nucleotide Sequence, ID:501075n

[0496] 1-63 Signal peptide

[0497] 70-87 6× Histag

[0498] 88-402 domain3 peptide

[0499] 403-426 Enterokinase linker

[0500] 433-1134 mG2a(CH2-CH3) constant region

[0501] Seq.160. His-Domain3-EKL-mG2a(CH2-CH3), Amino Acid Sequence, ID:501075p

[0502] 1-21 Signal peptide

[0503] 24-29 6× Histag

[0504] 30-134 domain3 peptide

[0505] 135-142 Enterokinase linker

[0506] 145-378 mG2a(CH2-CH3) constant region

[0507] Seq.161. His-Domain2-EKL-mG2a(CH2-CH3), Nucleotide Sequence, ID:501076n

[0508] 1-63 Signal peptide

[0509] 70-87 6× Histag

[0510] 88-348 domain2 peptide

[0511] 349-372 Enterokinase linker

[0512] 379-1080 mG2a(CH2-CH3) constant region

[0513] Seq.162. His-Domain2-EKL-mG2a(CH2-CH3), Amino Acid Sequence, ID:501076p

[0514] 1-21 Signal peptide

[0515] 24-29 6× Histag

[0516] 30-116 domain2 peptide

[0517] 117-124 Enterokinase linker

[0518] 127-360 mG2a(CH2-CH3) constant region

[0519] Seq.163. His-Domain 1-EKL-mG2a(CH2-CH3), Nucleotide Sequence, ID:501077n

[0520] 1-63 Signal peptide

[0521] 70-87 6× Histag

[0522] 88-312 domain1 peptide

[0523] 313-336 Enterokinase linker

[0524] 343-1044 mG2a(CH2-CH3) constant region

[0525] Seq.164. His-Domain 1-EKL-mG2a(CH2-CH3), Amino Acid Sequence, ID:501077p

[0526] 1-21 Signal peptide

[0527] 24-29 6× Histag

[0528] 30-104 domain1 peptide

[0529] 105-112 Enterokinase linker

[0530] 115-348 mG2a(CH2-CH3) constant region

[0531] Seq.165. His-EKL-Mutated_Domain3, Nucleotide Sequence, ID:501078n

[0532] 1-63 Signal peptide

[0533] 70-87 6× His Tag

[0534] 88-111 Enterokinase linker

[0535] 112-429 mutated domain3 peptide

[0536] Seq.166. His-EKL-Mutated_Domain3, Amino Acid Sequence, ID:501078p

[0537] 1-21 Signal peptide

[0538] 24-29 6× His Tag

[0539] 30-37 Enterokinase linker

[0540] 38-143 mutated domain3 peptide

[0541] Seq.167. Mutated_Domain3-EKL-hG1(CH2-CH3), Nucleotide Sequence, ID:501079n

[0542] 1-63 Signal peptide

[0543] 70-384 mutated domain3 peptide

[0544] 385-408 Enterokinase linker

[0545] 415-1113 hG1 (CH2-CH3) constant region

[0546] Seq.168. Mutated_Domain3-EKL-hG1(CH2-CH3), Amino Acid Sequence, ID:501079p

[0547] 1-21 Signal peptide

[0548] 24-128 domain3 peptide

[0549] 129-136 Enterokinase linker

[0550] 139-371 hG1(CH2-CH3) constant region

[0551] Seq.169. His-Mutated_Domain3-EKL-mG2a(CH2-CH3), Nucleotide Sequence, ID:501080n

[0552] 1-63 Signal peptide

[0553] 70-87 6× Histag

[0554] 88-402 mutated domain3 peptide

[0555] 403-426 Enterokinase linker

[0556] 433-1134 mG2a(CH2-CH3) constant region

[0557] Seq.170. His-Mutated_Domain3-EKL-mG2a(CH2-CH3), Amino Acid Sequence, ID:501080p

[0558] 1-21 Signal peptide

[0559] 24-29 6× Histag

[0560] 30-134 domain3 peptide

[0561] 135-142 Enterokinase linker

[0562] 145-378 mG2a(CH2-CH3) constant region

[0563] Seq.171. His-EKL-Loop-Peptide, Nucleotide Sequence, ID:501081n

[0564] 1-63 Signal peptide

[0565] 70-87 6× His Tag

[0566] 88-111 Enterokinase linker

[0567] 112-216 loop peptide

[0568] Seq.172. His-EKL-Loop-Peptide Amino Acid Sequence, ID:501081p

[0569] 1-21 Signal peptide

[0570] 24-29 6× His Tag

[0571] 30-37 Enterokinase linker

[0572] 38-72 loop peptide

[0573] Seq.173. SPe-His-NPY, Nucleotide Sequence, ID:501078n

[0574] 1-84 Signal peptide

[0575] 85-102 6× Histag

[0576] 103-312 Neuropeptide Y

[0577] Seq.174. SPe-His-NPY, Amino Acid Sequence, ID:501078p

[0578] 1-28 Signal peptide

[0579] 29-34 6× Histag

[0580] 35-104 Neuropeptide Y

[0581] Seq.175. SPe-His-NPY(PDAEG), Nucleotide Sequence, ID:501079n

[0582] 1-84 Signal peptide

[0583] 85-102 6× Histag

[0584] 103-312 Neuropeptide Y

[0585] Seq.176. SPe-His-NPY(PDAEG), Amino Acid Sequence, ID:501079p

[0586] 1-28 Signal peptide

[0587] 29-34 6× Histag

[0588] 35-104 Neuropeptide Y

[0589] Seq.177. SPe-His-NPY(NTSEE), Nucleotide Sequence, ID:501080n

[0590] 1-84 Signal peptide

[0591] 85-102 6× Histag

[0592] 103-312 Neuropeptide Y

[0593] Seq.178. SPe-His-NPY(NTSEE), Amino Acid Sequence, ID:501080p

[0594] 1-28 Signal peptide

[0595] 29-34 6× Histag

[0596] 35-104 Neuropeptide Y

[0597] Seq.179. SPe-His-NPY(PDAEG_STNDD), Nucleotide Sequence, ID:501081n

[0598] 1-84 Signal peptide

[0599] 85-102 6× Histag

[0600] 103-312 Neuropeptide Y

[0601] Seq.180. SPe-His-NPY(PDAEG_STNDD), Amino Acid Sequence, ID:501081p

[0602] 1-28 Signal peptide

[0603] 29-34 6× Histag

[0604] 35-104 Neuropeptide Y

[0605] Seq.181. SPe-His-NPY(PDAEG_Tetanus), Nucleotide Sequence, ID:501082n

[0606] 1-84 Signal peptide

[0607] 85-102 6× Histag

[0608] 103-312 Neuropeptide Y

[0609] Seq.182. SPe-His-NPY(PDAEG_Tetanus), Amino Acid Sequence, ID:501082p

[0610] 1-28 Signal peptide

[0611] 29-34 6× Histag

[0612] 35-104 Neuropeptide Y

[0613] Seq.183. His-EKL-D3(DSTDN), Nucleotide Sequence, ID:501083n

[0614] 1-63 Signal peptide

[0615] 64-87 6× Histag

[0616] 88-111 Enterokinase linker

[0617] 111-429 Domain 3 mutant

[0618] Seq.184. His-EKL-D3(DSTDN), Amino Acid Sequence, ID:501083p

[0619] 1-21 Signal peptide

[0620] 22-29 6× Histag

[0621] 30-37 Enterokinase linker

[0622] 38-143 Domain 3 mutant

[0623] Seq.185. His-EKL-D3(ETSEQ), Nucleotide Sequence, ID:501084n

[0624] 1-63 Signal peptide

[0625] 64-87 6× Histag

[0626] 88-111 Enterokinase linker

[0627] 111-429 Domain 3 mutant

[0628] Seq.186. His-EKL-D3(ETSEQ), Amino Acid Sequence, ID:501084p

[0629] 1-21 Signal peptide

[0630] 22-29 6× Histag

[0631] 30-37 Enterokinase linker

[0632] 38-143 Domain 3 mutant

[0633] Seq.187. His-EKL-D3(KSTEN), Nucleotide Sequence, ID:501085n

[0634] 1-63 Signal peptide

[0635] 64-87 6× Histag

[0636] 88-111 Enterokinase linker

[0637] 111-429 Domain 3 mutant

[0638] Seq.188. His-EKL-D3(KSTEN), Amino Acid Sequence, ID:501085p

[0639] 1-21 Signal peptide

[0640] 22-29 6× Histag

[0641] 30-37 Enterokinase linker

[0642] 38-143 Domain 3 mutant

[0643] Seq.189. His-EKL-D3(NSTEE), Nucleotide Sequence, ID:501086n

[0644] 1-63 Signal peptide

[0645] 64-87 6× Histag

[0646] 88-111 Enterokinase linker

[0647] 111-429 Domain 3 mutant

[0648] Seq.190. His-EKL-D3(NSTEE), Amino Acid Sequence, ID:501086p

[0649] 1-21 Signal peptide

[0650] 22-29 6× Histag

[0651] 30-37 Enterokinase linker

[0652] 38-143 Domain 3 mutant

[0653] Seq.191. His-EKL-D3(DSTEN), Nucleotide Sequence

[0654] 1-63 Signal peptide

[0655] 64-87 6× Histag

[0656] 88-111 Enterokinase linker

[0657] 111-429 Domain 3 mutant

[0658] Seq.192. His-EKL-D3(DSTEN), Amino Acid Sequence

[0659] 1-21 Signal peptide

[0660] 22-29 6× Histag

[0661] 30-37 Enterokinase linker

[0662] 38-143 Domain 3 mutant

[0663] Seq.193. His-EKL-D3(ESTEQ), Nucleotide Sequence

[0664] 1-63 Signal peptide

[0665] 64-87 6× Histag

[0666] 88-111 Enterokinase linker

[0667] 111-429 Domain 3 mutant

[0668] Seq.194. His-EKL-D3(ESTEQ), Amino Acid Sequence

[0669] 1-21 Signal peptide

[0670] 22-29 6× Histag

[0671] 30-37 Enterokinase linker

[0672] 38-143 Domain 3 mutant

[0673] Seq.195. His-EKL-D3(ETSEN), Nucleotide Sequence

[0674] 1-63 Signal peptide

[0675] 64-87 6× Histag

[0676] 88-111 Enterokinase linker

[0677] 111-429 Domain 3 mutant

[0678] Seq.196. His-EKL-D3(ETSEN), Amino Acid Sequence

[0679] 1-21 Signal peptide

[0680] 22-29 6× Histag

[0681] 30-37 Enterokinase linker

[0682] 38-143 Domain 3 mutant

[0683] Seq.197. His-EKL-D3(RSTEN), Nucleotide Sequence

[0684] 1-63 Signal peptide

[0685] 64-87 6× Histag

[0686] 88-111 Enterokinase linker

[0687] 111-429 Domain 3 mutant

[0688] Seq.198. His-EKL-D3(RSTEN), Amino Acid Sequence

[0689] 1-21 Signal peptide

[0690] 22-29 6× Histag

[0691] 30-37 Enterokinase linker

[0692] 38-143 Domain 3 mutant

[0693] Seq.199. D3(DSTDN)-EKL-hG1(CH2-CH3), Nucleotide Sequence

[0694] 1-63 Signal peptide

[0695] 70-384 Domain 3 mutant

[0696] 385-408 Enterokinase linker

[0697] 409-1113 hG1(CH2-CH3) constant region

[0698] Seq.200. D3(DSTDN)-EKL-hG1(CH2-CH3), Amino Acid Sequence

[0699] 1-21 Signal peptide

[0700] 22-128 Domain 3 mutant

[0701] 129-136 Enterokinase linker

[0702] 137-371 hG1(CH2-CH3) constant region

[0703] Seq.201. D3(DSTEN)-EKL-hG1(CH2-CH3), Nucleotide Sequence

[0704] 1-63 Signal peptide

[0705] 70-384 Domain 3 mutant

[0706] 385-408 Enterokinase linker

[0707] 409-1113 hG1(CH2-CH3) constant region

[0708] Seq.202. D3(DSTEN)-EKL-hG1(CH2-CH3), Amino Acid Sequence

[0709] 1-21 Signal peptide

[0710] 22-128 Domain 3 mutant

[0711] 129-136 Enterokinase linker

[0712] 137-371 hG1 (CH2-CH3) constant region

[0713] Seq.203. D3(ESTEQ)-EKL-hG1(CH2-CH3), Nucleotide Sequence

[0714] 1-63 Signal peptide

[0715] 70-384 Domain 3 mutant

[0716] 385-408 Enterokinase linker

[0717] 409-1113 hG1 (CH2-CH3) constant region

[0718] Seq.204. D3(ESTEQ)-EKL-hG1(CH2-CH3), Amino Acid Sequence

[0719] 1-21 Signal peptide

[0720] 22-128 Domain 3 mutant

[0721] 129-136 Enterokinase linker

[0722] 137-371 hG1(CH2-CH3) constant region

[0723] Seq.205. D3(ETSEN)-EKL-hG1(CH2-CH3), Nucleotide Sequence

[0724] 1-63 Signal peptide

[0725] 70-384 Domain 3 mutant

[0726] 385-408 Enterokinase linker

[0727] 409-1113 hG1 (CH2-CH3) constant region

[0728] Seq.206. D3(ETSEN)-EKL-hG1(CH2-CH3), Amino Acid Sequence

[0729] 1-21 Signal peptide

[0730] 22-128 Domain 3 mutant

[0731] 129-136 Enterokinase linker

[0732] 137-371 hG1(CH2-CH3) constant region

[0733] Seq.207. D3(ETSEQ)-EKL-hG1(CH2-CH3), Nucleotide Sequence

[0734] 1-63 Signal peptide

[0735] 70-384 Domain 3 mutant

[0736] 385-408 Enterokinase linker

[0737] 409-1113 hG1 (CH2-CH3) constant region

[0738] Seq.208. D3(ETSEQ)-EKL-hG1(CH2-CH3), Amino Acid Sequence

[0739] 1-21 Signal peptide

[0740] 22-128 Domain 3 mutant

[0741] 129-136 Enterokinase linker

[0742] 137-371 hG1 (CH2-CH3) constant region

[0743] Seq.209. D3(KSTEN)-EKL-hG1(CH2-CH3), Nucleotide Sequence

[0744] 1-63 Signal peptide

[0745] 70-384 Domain 3 mutant

[0746] 385-408 Enterokinase linker

[0747] 409-1113 hG1(CH2-CH3) constant region

[0748] Seq.210. D3(KSTEN)-EKL-hG1(CH2-CH3), Amino Acid Sequence

[0749] 1-21 Signal peptide

[0750] 22-128 Domain 3 mutant

[0751] 129-136 Enterokinase linker

[0752] 137-371 hG1(CH2-CH3) constant region

[0753] Seq.211. D3(NSTEE)-EKL-hG1(CH2-CH3), Nucleotide Sequence

[0754] 1-63 Signal peptide

[0755] 70-384 Domain 3 mutant

[0756] 385-408 Enterokinase linker

[0757] 409-1113 hG1(CH2-CH3) constant region

[0758] Seq.212. D3(NSTEE)-EKL-hG1(CH2-CH3), Amino Acid Sequence

[0759] 1-21 Signal peptide

[0760] 22-128 Domain 3 mutant

[0761] 129-136 Enterokinase linker

[0762] 137-371 hG1(CH2-CH3) constant region

[0763] Seq.213. D3(RSTEN)-EKL-hG1(CH2-CH3), Nucleotide Sequence

[0764] 1-63 Signal peptide

[0765] 70-384 Domain 3 mutant

[0766] 385-408 Enterokinase linker

[0767] 409-1113 hG1(CH2-CH3) constant region

[0768] Seq.214. D3(RSTEN)-EKL-hG1(CH2-CH3), Amino Acid Sequence

[0769] 1-21 Signal peptide

[0770] 22-128 Domain 3 mutant

[0771] 129-136 Enterokinase linker

[0772] 137-371 hG1 (CH2-CH3) constant region

[0773] Seq.215. His-D3(DSTDN)-EKL-mG2a(CH2-CH3), Nucleotide Sequence

[0774] 1-63 Signal peptide

[0775] 70-87 6× Histag

[0776] 88-402 Domain 3 mutant

[0777] 403-426 Enterokinase linker

[0778] 427-1134 mG2a(CH2-CH3) constant region

[0779] Seq.216. His-D3(DSTDN)-EKL-mG2a(CH2-CH3), Amino Acid Sequence

[0780] 1-21 Signal peptide

[0781] 22-29 6× Histag

[0782] 30-134 Domain 3 mutant

[0783] 135-142 Enterokinase linker

[0784] 143-378 mG2a(CH2-CH3) constant region

[0785] Seq.217. His-D3(DSTEN)-EKL-mG2a(CH2-CH3), Nucleotide Sequence

[0786] 1-63 Signal peptide

[0787] 70-87 6× Histag

[0788] 88-402 Domain 3 mutant

[0789] 403-426 Enterokinase linker

[0790] 427-1134 mG2a(CH2-CH3) constant region

[0791] Seq.218. His-D3(DSTEN)-EKL-mG2a(CH2-CH3), Amino Acid Sequence

[0792] 1-21 Signal peptide

[0793] 22-29 6× Histag

[0794] 30-134 Domain 3 mutant

[0795] 135-142 Enterokinase linker

[0796] 143-378 mG2a(CH2-CH3) constant region

[0797] Seq.219. His-D3(ESTEQ)-EKL-mG2a(CH2-CH3), Nucleotide Sequence

[0798] 1-63 Signal peptide

[0799] 70-87 6× Histag

[0800] 88-402 Domain 3 mutant

[0801] 403-426 Enterokinase linker

[0802] 427-1134 mG2a(CH2-CH3) constant region

[0803] Seq.220. His-D3(ESTEQ)-EKL-mG2a(CH2-CH3), Amino Acid Sequence

[0804] 1-21 Signal peptide

[0805] 22-29 6× Histag

[0806] 30-134 Domain 3 mutant

[0807] 135-142 Enterokinase linker

[0808] 143-378 mG2a(CH2-CH3) constant region

[0809] Seq.221. His-D3(ETSEN)-EKL-mG2a(CH2-CH3), Nucleotide Sequence

[0810] 1-63 Signal peptide

[0811] 70-87 6× Histag

[0812] 88-402 Domain 3 mutant

[0813] 403-426 Enterokinase linker

[0814] 427-1134 mG2a(CH2-CH3) constant region

[0815] Seq.222. His-D3(ETSEN)-EKL-mG2a(CH2-CH3), Amino Acid Sequence

[0816] 1-21 Signal peptide

[0817] 22-29 6× Histag

[0818] 30-134 Domain 3 mutant

[0819] 135-142 Enterokinase linker

[0820] 143-378 mG2a(CH2-CH3) constant region

[0821] Seq.223. His-D3(ETSEQ)-EKL-mG2a(CH2-CH3), Nucleotide Sequence

[0822] 1-63 Signal peptide

[0823] 70-87 6× Histag

[0824] 88-402 Domain 3 mutant

[0825] 403-426 Enterokinase linker

[0826] 427-1134 mG2a(CH2-CH3) constant region

[0827] Seq.224. His-D3(ETSEQ)-EKL-mG2a(CH2-CH3), Amino Acid Sequence

[0828] 1-21 Signal peptide

[0829] 22-29 6× Histag

[0830] 30-134 Domain 3 mutant

[0831] 135-142 Enterokinase linker

[0832] 143-378 mG2a(CH2-CH3) constant region

[0833] Seq.225. His-D3(KSTEN)-EKL-mG2a(CH2-CH3), Nucleotide Sequence

[0834] 1-63 Signal peptide

[0835] 70-87 6× Histag

[0836] 88-402 Domain 3 mutant

[0837] 403-426 Enterokinase linker

[0838] 427-1134 mG2a(CH2-CH3) constant region

[0839] Seq.226. His-D3(KSTEN)-EKL-mG2a(CH2-CH3), Amino Acid Sequence

[0840] 1-21 Signal peptide

[0841] 22-29 6× Histag

[0842] 30-134 Domain 3 mutant

[0843] 135-142 Enterokinase linker

[0844] 143-378 mG2a(CH2-CH3) constant region

[0845] Seq.227. His-D3(NSTEE)-EKL-mG2a(CH2-CH3), Nucleotide Sequence

[0846] 1-63 Signal peptide

[0847] 70-87 6× Histag

[0848] 88-402 Domain 3 mutant

[0849] 403-426 Enterokinase linker

[0850] 427-1134 mG2a(CH2-CH3) constant region

[0851] Seq.228. His-D3(NSTEE)-EKL-mG2a(CH2-CH3), Amino Acid Sequence

[0852] 1-21 Signal peptide

[0853] 22-29 6× Histag

[0854] 30-134 Domain 3 mutant

[0855] 135-142 Enterokinase linker

[0856] 143-378 mG2a(CH2-CH3) constant region

[0857] Seq.229. His-D3(RSTEN)-EKL-mG2a(CH2-CH3), Nucleotide Sequence

[0858] 1-63 Signal peptide

[0859] 70-87 6× Histag

[0860] 88-402 Domain 3 mutant

[0861] 403-426 Enterokinase linker

[0862] 427-1134 mG2a(CH2-CH3) constant region

[0863] Seq.230. His-D3(RSTEN)-EKL-mG2a(CH2-CH3), Amino Acid Sequence

[0864] 1-21 Signal peptide

[0865] 22-29 6× Histag

[0866] 30-134 Domain 3 mutant

[0867] 135-142 Enterokinase linker

[0868] 143-378 mG2a(CH2-CH3) constant region

[0869] In some embodiments control peptides (SEQ ID NOs: 231-234) are included which are

[0870] derived from lysostaphin, as an unrelated irrelevant protein, and which may be detected by

[0871] control antisera prepared to lysostaphin.

[0872] Seq.231. SPe-His-NPY(PDAEG_GSTGYSTAP), Nucleotide Sequence, ID:501083n

[0873] 1-84 Signal peptide

[0874] 85-102 6× Histag

[0875] 103-324 Neuropeptide Y mutant

[0876] Seq.232. SPe-His-NPY(PDAEG_GSTGYSTAP), Amino Acid Sequence, ID:501083p

[0877] 1-28 Signal peptide

[0878] 29-34 6× Histag

[0879] 35-108 Neuropeptide Y mutant

[0880] Seq.233. SPe-His-NPY(PDAEG_VMKQDGHVM), Nucleotide Sequence, ID:501084n

[0881] 1-84 Signal peptide

[0882] 85-102 6× Histag

[0883] 103-324 Neuropeptide Y mutant

[0884] Seq.234. SPe-His-NPY(PDAEG_VMKQDGHVM), Amino Acid Sequence, ID:501084p

[0885] 1-28 Signal peptide

[0886] 29-34 6× Histag

[0887] 35-108 Neuropeptide Y mutant

### Example 4 Additional Neurologic Proteins Containing Mimics for Zika

[0888] Searching of the human proteome database using an automated key word search argument revealed additional peptide motifs which are mimics in Zika (source) shared with neurologic protein (targets). The key word search was configured to identify proteins curated to contain “neur” “glial” and “synapt”. This revealed pentamer mimics in isoforms of optineurin and in brain derived neurotrophic factor. In both cases the pentamers are within B cell epitopes in both Zika envelope and B cell epitopes in the neurologic protein. In the source protein B cell epitope is defined as having a predicted binding affinity of <−0.6 standard deviation units relative to the protein as a whole and in the target as either high stringency (having a predicted binding affinity of <−0.6 standard deviation units relative to the protein as a whole) or low stringency (having a predicted binding affinity of <−0.3 standard deviation units relative to the protein as a whole).

TABLE 9

| SEQ | Motif | Target neurologic protein |
|---|---|---|
| SEQ 255 | PRAEA | Optineurin (multiple isoforms) |
| | | UniProtKB - Q96CV9 |
| | | (OPTN_HUMAN) |
| SEQ 256 | MSGGT | Brain derived neurotropic |
| | | factor (multiple isoforms) |
| | | UniProtKB - P23560 |
| | | (BDNF_HUMAN); |
| | | also Cochlin, UniProtKB G3V4C4_HUMAN |

### Example 5: Epitope Mimics in Dengue Virus Serotype 1

[0889] Analysis of the neurologic proteins in which we found epitope mimics in the Zika envelope identified Zika envelope as having a pentamer B cell binding mimic (KGRLS) in many isoforms of neural navigator protein 2 (NAV2). Further analysis of NAV2 and other flaviviruses analyzed simultaneously demonstrated a mimic also occurs and is highly conserved in the Domain III loop of dengue type 1 strains. This mimic was present in all 146 South American dengue type 1 isolates analyzed. There is therefore concern that the double mimic which could occur when both Zika and dengue type 1 are co endemic could be adverse or that one or other of the mimics acting alone could have an adverse effect in producing antibodies reactive with this protein which is critical in neural elongation and in early neural tissue development [20, 21]. Thus the present invention includes vaccine proteins in which this mimic has been mutated.

TABLE 10

| | Virus | Virus | BEPI | | | |
|---|---|---|---|---|---|---|
| | pentamer | Envelope | strength in | MHC II in | NAV2 | |
| Virus | motif | position | Source virus | Source virus | position | NAV2 Bepi? |
| Zika (all | ~KGRLS~ | 284, Domain I | Moderate | Moderate all | Position 1013 | yes |
| isolates) | | | | DRB and DP | BEPI centered | |
| | | | | and DQ alleles | at position 1015 | |
| Dengue (only | ~TDKEK~ | , Domain III | Moderate | Moderate, not | Position 1185, | Yes |
| DEN3 | | loop5* | | all MHC | BEPI centered at | |
| | | | | alleles | 1187. | |

*as shown in FIG. 12, 13, 14, 15

[0890] In order to test the reactivity of sera from ZIKV exposed and dengue exposed subjects to epitope mimics identifies in neural navigator 2 isoforms (NAV2) a series of recombinant polypeptides are prepared including the wild type motifs in NAV2 and scrambled peptide forms of the mimics shown in Table 10, as well as sequences derived from NAV2 which contain appropriate positive and negative controls based on yellow fever and tetanus. Sequences for these constructs are as follows (SEQ ID NOs: 235-244)

[0891] Seq.235. His-NN2-KGRLS-TDKEK, Nucleotide Sequence, ID:501090n

[0892] 1-63 Signal peptide

[0893] 70-87 6× Histag

[0894] 88-810 Neuron Navigator 2

[0895] Seq.236. His-NN2-KGRLS-TDKEK, Amino Acid Sequence, ID:501090p

[0896] 1-21 Signal peptide

[0897] 23-29 6× Histag

[0898] 30-270 Neuron Navigator 2

[0899] Seq.237. His-NN2-LRKGS-TDKEK, Nucleotide Sequence, ID:501091n

[0900] 1-63 Signal peptide

[0901] 70-87 6× Histag

[0902] 88-810 Neuron Navigator 2 mutant

[0903] Seq.238. His-NN2-LRKGS-TDKEK, Amino Acid Sequence, ID:501091p

[0904] 1-21 Signal peptide

[0905] 23-29 6× Histag

[0906] 30-270 Neuron Navigator 2 mutant

[0907] Seq.239. His-NN2-KGRLS-DTREK, Nucleotide Sequence, ID:501092n

[0908] 1-63 Signal peptide

[0909] 70-87 6× Histag

[0910] 88-810 Neuron Navigator 2 mutant

[0911] Seq.240. His-NN2-KGRLS-DTREK, Amino Acid Sequence, ID:501092p

[0912] 1-21 Signal peptide

[0913] 23-29 6× Histag

[0914] 30-270 Neuron Navigator 2 mutant

[0915] Seq.241. His-NN2-STNDD-DTREK, Nucleotide Sequence, ID:501093n

[0916] 1-63 Signal peptide

[0917] 70-87 6× Histag

[0918] 88-810 Neuron Navigator 2 mutant

[0919] Seq.242. His-NN2-STNDD-DTREK, Amino Acid Sequence, ID:501093p

[0920] 1-21 Signal peptide

[0921] 23-29 6× Histag

[0922] 30-270 Neuron Navigator 2 mutant

[0923] Seq.243. His-NN2-SKDVQLKNITDYMYL-DTREK, Nucleotide Sequence, ID:501094n

[0924] 1-63 Signal peptide

[0925] 70-87 6× Histag

[0926] 88-840 Neuron Navigator 2 mutant

[0927] Seq.244. Light Chain Variable Region, Amino Acid Sequence, ID:501094p

[0928] 1-21 Signal peptide

[0929] 23-29 6× Histag

[0930] 30-280 Neuron Navigator 2 mutant

### Example 6 Selection of Peptides for Use in a Differential Diagnostic Kit

[0931] Given the need to be able to differentially diagnose exposer the Zika virus and dengue viruses types 1-4 and the likely co-endemnicity of yellow fever plus the use of vaccines to both dengue and yellow fever in Zika endemic regions, we identified peptides for each virus envelope which are also in the top 10% of linear B cell binders. We utilized strains for dengue that have recently circulated in Brazil, but the peptides were also cross checked on reference strains of each dengue. The vaccine strain of Yellow fever 17D was included. These were then compared using a missing data array to select peptides (Table 11). A set of high binding B cell epitope pentamers specific for each virus was then assembled as show in Table 12.

TABLE 11

| | | 130529 | (969945757 | | |
|---|---|---|---|---|---|
| | N | YEFV | Zika | | |
| BEPIPent | Rows | 17D | virus) | GQ330473_D3_BR_RP_Al95_2009_3 | GQ379163_YFcase_#2) |
| ADTGT | 1 | | 1 | | |
| ADTQG | 2 | | | | |
| AEENE | 2 | 1 | | | 1 |
| AEPPF | 4 | | | 1 | |
| AGTDG | 1 | | 1 | | |
| APPSE | 1 | | | | |
| APTSE | 2 | | | | |
| ASTND | 2 | 1 | | | 1 |
| ASTSQ | 3 | | | | |
| ATEVD | 3 | | | | |
| ATTET | 2 | | | 1 | |
| CPSTG | 2 | 1 | | | 1 |
| CPTQG | 9 | | 1 | 1 | |
| DEKGV | 3 | | | | |
| DGQGK | 2 | | | 1 | |
| DKCPS | 2 | 1 | | | 1 |
| DSGDG | 3 | | | | |
| DSRCP | 6 | | 1 | 1 | |
| DTGHE | 1 | | 1 | | |
| DTGHG | 2 | 1 | | | 1 |
| DTGKH | 2 | | | | |
| DTGTP | 1 | | 1 | | |
| DTNDN | 2 | 1 | | | 1 |
| DTQGS | 2 | | | | |
| DTSNH | 3 | | | | |
| EDGQG | 2 | | | 1 | |
| EENEG | 2 | 1 | | | 1 |
| EGAGA | 3 | | | | |
| EGDGS | 2 | | | | |
| EGDNA | 2 | 1 | | | 1 |
| EGTDA | 3 | | | | |
| EIQNS | 2 | | | 1 | |
| EIQTS | 3 | | | | |
| EKGVT | 3 | | | | |
| ENEGD | 2 | 1 | | | 1 |
| ESTEN | 1 | | 1 | | |
| ETDEN | 1 | | 1 | | |
| ETPTW | 2 | | | 1 | |
| ETTEH | 3 | | | | |
| EVDSG | 3 | | | | |
| EVSET | 2 | | | 1 | |
| GADTG | 1 | | 1 | | |
| GADTQ | 2 | | | | |
| CASTS | 3 | | | | |
| GATTE | 2 | | | 1 | |
| GDGSP | 2 | | | | |
| GHETD | 1 | | 1 | | |
| GKAHN | 2 | | | 1 | |
| GKHGK | 2 | | | | |
| GNDTG | 2 | | | | |
| GNDTS | 3 | | | | |
| GNETQ | 2 | | | 1 | |
| GNETT | 3 | | | | |
| GNQEG | 2 | 1 | | | 1 |
| GQGKA | 2 | | | 1 | |
| GTDGP | 1 | | 1 | | |
| GTPHW | 1 | | 1 | | |
| GVTQN | 3 | | | | |
| HETDE | 1 | | 1 | | |
| IASTN | 2 | 1 | | | 1 |
| IQNSG | 2 | | | 1 | |
| IQTSG | 3 | | | | |
| ISNTT | 3 | | | | |
| ITPNS | 1 | | 1 | | |
| ITPQA | 5 | | | 1 | |
| ITPQS | 2 | | | | |
| ITPRS | 3 | | | | |
| KCPST | 2 | 1 | | | 1 |
| KDTND | 2 | 1 | | | 1 |
| KGEDA | 2 | | | 1 | |
| KGRLS | 1 | | 1 | | |
| KGVTQ | 3 | | | | |
| NDTGK | 2 | | | | |
| NDTSN | 3 | | | | |
| NEGDN | 2 | 1 | | | 1 |
| NETQG | 2 | | | 1 | |
| NETTE | 3 | | | | |
| NPTDT | 2 | 1 | | | 1 |
| NQEGS | 2 | 1 | | | 1 |
| NSGGT | 2 | | | 1 | |
| NSPRA | 1 | | 1 | | |
| NSRNT | 3 | | | | |
| NTTTD | 3 | | | | |
| PHAKK | 2 | | | | |
| PNSPR | 1 | | 1 | | |
| PPSE1 | 1 | | | | |
| PQAPP | 1 | | | | |
| PQAPT | 2 | | | | |
| PQAST | 2 | | | 1 | |
| PQSST | 2 | | | | |
| PRAEA | 1 | | 1 | | |
| PRSPS | 3 | | | | |
| PSTGE | 2 | 1 | | | 1 |
| PTDTG | 2 | 1 | | | 1 |
| QAPPS | 1 | | | | |
| QAPTS | 2 | | | | |
| QASTT | 2 | | | 1 | |
| QEGSL | 2 | 1 | | | 1 |
| QGKAH | 2 | | | 1 | |
| QNSGG | 2 | | | 1 | |
| QSSTT | 2 | | | | |
| QTSGT | 3 | | | | |
| QVGNE | 5 | | | 1 | |
| RCPTQ | 9 | | 1 | 1 | |
| SETQH | 2 | | | 1 | |
| SGAST | 3 | | | | |
| SGATT | 2 | | | 1 | |
| SNTTT | 3 | | | | |
| SPRAE | 1 | | 1 | | |
| SQETW | 3 | | | | |
| SRCPT | 6 | | 1 | 1 | |
| SRNTS | 3 | | | | |
| SSTTE | 2 | | | | |
| STEDG | 2 | | | 1 | |
| STSQE | 3 | | | | |
| TDENR | 1 | | 1 | | |
| TDTGH | 2 | 1 | | | 1 |
| TEDGQ | 2 | | | 1 | |
| TEPPF | 3 | | | | |
| TESTE | 1 | | 1 | | |
| TETPT | 2 | | | 1 | |
| TEVDS | 3 | | | | |
| TGHET | 1 | | 1 | | |
| TGKHG | 2 | | | | |
| TGTPH | 1 | | 1 | | |
| TKDTN | 2 | 1 | | | 1 |
| TNDNN | 2 | 1 | | | 1 |
| TNSRN | 3 | | | | |
| TPNSP | 1 | | 1 | | |
| TPQAP | 3 | | | | |
| TPQAS | 2 | | | 1 | |
| TPQSS | 2 | | | | |
| TPRSP | 3 | | | | |
| TQGSN | 2 | | | | |
| TSNHG | 3 | | | | |
| TSQET | 3 | | | | |
| TTEAE | 2 | | | | |
| TTEHG | 3 | | | | |
| TTETP | 2 | | | 1 | |
| TTTDS | 3 | | | | |
| VDSGD | 3 | | | | |
| VGNDT | 5 | | | | |
| VGNET | 5 | | | 1 | |
| VSETQ | 2 | | | 1 | |
| YEGDG | 2 | | | | |
| YEGTD | 3 | | | | |

| | | JF808120_Den3 | | JQ513335 |
|---|---|---|---|---|
| BEPIPent | HQ184924_SPH306629_Den2) | BR_AL95_2009) | JN848496_SPH323844_Den4) | H778494_Den4 |
| ADTGT | | | | |
| ADTQG | 1 | | | |
| AEENE | | | | |
| AEPPF | 1 | 1 | | |
| AGTDG | | | | |
| APPSE | | | | |
| APTSE | | | | |
| ASTND | | | | |
| ASTSQ | | | | |
| ATEVD | | | 1 | 1 |
| ATTET | | 1 | | |
| CPSTG | | | | |
| CPTQG | | 1 | 1 | 1 |
| DEKGV | | | | |
| DGQGK | | 1 | | |
| DKCPS | | | | |
| DSGDG | | | 1 | 1 |
| DSRCP | | 1 | | |
| DTGHE | | | | |
| DTGHG | | | | |
| DTGKH | 1 | | | |
| DTGTP | | | | |
| DTNDN | | | | |
| DTQGS | 1 | | | |
| DTSNH | | | 1 | 1 |
| EDGQG | | 1 | | |
| EENEG | | | | |
| EGAGA | | | 1 | 1 |
| EGDGS | 1 | | | |
| EGDNA | | | | |
| EGTDA | | | | |
| EIQNS | | 1 | | |
| EIQTS | | | | |
| EKGVT | | | | |
| ENEGD | | | | |
| ESTEN | | | | |
| ETDEN | | | | |
| ETPTW | | 1 | | |
| ETTEH | | | | |
| EVDSG | | | 1 | 1 |
| EVSET | | 1 | | |
| GADTG | | | | |
| GADTQ | 1 | | | |
| CASTS | | | | |
| GATTE | | 1 | | |
| GDGSP | 1 | | | |
| GHETD | | | | |
| GKAHN | | 1 | | |
| GKHGK | 1 | | | |
| GNDTG | 1 | | | |
| GNDTS | | | 1 | 1 |
| GNETQ | | 1 | | |
| GNETT | | | | |
| GNQEG | | | | |
| GQGKA | | 1 | | |
| GTDGP | | | | |
| GTPHW | | | | |
| GVTQN | | | | |
| HETDE | | | | |
| IASTN | | | | |
| IQNSG | | 1 | | |
| IQTSG | | | | |
| ISNTT | | | | |
| ITPNS | | | | |
| ITPQA | | 1 | | |
| ITPQS | 1 | | | |
| ITPRS | | | 1 | 1 |
| KCPST | | | | |
| KDTND | | | | |
| KGEDA | | 1 | | |
| KGRLS | | | | |
| KGVTQ | | | | |
| NDTGK | 1 | | | |
| NDTSN | | | 1 | 1 |
| NEGDN | | | | |
| NETQG | | 1 | | |
| NETTE | | | | |
| NPTDT | | | | |
| NQEGS | | | | |
| NSGGT | | 1 | | |
| NSPRA | | | | |
| NSRNT | | | 1 | 1 |
| NTTTD | | | | |
| PHAKK | 1 | | | |
| PNSPR | | | | |
| PPSE1 | | | | |
| PQAPP | | | | |
| PQAPT | | | | |
| PQAST | | 1 | | |
| PQSST | 1 | | | |
| PRAEA | | | | |
| PRSPS | | | 1 | 1 |
| PSTGE | | | | |
| PTDTG | | | | |
| QAPPS | | | | |
| QAPTS | | | | |
| QASTT | | 1 | | |
| QEGSL | | | | |
| QGKAH | | 1 | | |
| QNSGG | | 1 | | |
| QSSTT | 1 | | | |
| QTSGT | | | | |
| QVGNE | | 1 | | |
| RCPTQ | | 1 | 1 | 1 |
| SETQH | | 1 | | |
| SGAST | | | | |
| SGATT | | 1 | | |
| SNTTT | | | | |
| SPRAE | | | | |
| SQETW | | | | |
| SRCPT | | 1 | | |
| SRNTS | | | 1 | 1 |
| SSTTE | 1 | | | |
| STEDG | | 1 | | |
| STSQE | | | | |
| TDENR | | | | |
| TDTGH | | | | |
| TEDGQ | | 1 | | |
| TEPPF | | | | |
| TESTE | | | | |
| TETPT | | 1 | | |
| TEVDS | | | 1 | 1 |
| TGHET | | | | |
| TGKHG | | | | |
| TGTPH | | | | |
| TKDTN | | | | |
| TNDNN | | | | |
| TNSRN | | | 1 | 1 |
| TPNSP | | | | |
| TPQAP | | | | |
| TPQAS | | 1 | | |
| TPQSS | 1 | | | |
| TPRSP | | | 1 | 1 |
| TQGSN | 1 | | | |
| TSNHG | | | 1 | 1 |
| TSQET | | | | |
| TTEAE | 1 | | | |
| TTEHG | | | | |
| TTETP | | 1 | | |
| TTTDS | | | | |
| VDSGD | | | 1 | 1 |
| VGNDT | 1 | | 1 | 1 |
| VGNET | | 1 | | |
| VSETQ | | 1 | | |
| YEGDG | 1 | | | |
| YEGTD | | | | |

| BEPIPent | KP858105_Den1_GO091_2013_BR | KP858119_Den1_GO280_2013_BR | HQ184925_den2_SPH306593_2 |
|---|---|---|---|
| ADTGT | | | |
| ADTQG | | | 1 |
| AEENE | | | |
| AEPPF | | | 1 |
| AGTDG | | | |
| APPSE | | 1 | |
| APTSE | 1 | | |
| ASTND | | | |
| ASTSQ | 1 | 1 | |
| ATEVD | | | |
| ATTET | | | |
| CPSTG | | | |
| CPTQG | 1 | 1 | |
| DEKGV | 1 | 1 | |
| DGQGK | | | |
| DKCPS | | | |
| DSGDG | | | |
| DSRCP | 1 | 1 | |
| DTGHE | | | |
| DTGHG | | | |
| DTGKH | | | 1 |
| DTGTP | | | |
| DTNDN | | | |
| DTQGS | | | 1 |
| DTSNH | | | |
| EDGQG | | | |
| EENEG | | | |
| EGAGA | | | |
| EGDGS | | | 1 |
| EGDNA | | | |
| EGTDA | 1 | 1 | |
| EIQNS | | | |
| EIQTS | 1 | 1 | |
| EKGVT | 1 | 1 | |
| ENEGD | | | |
| ESTEN | | | |
| ETDEN | | | |
| ETPTW | | | |
| ETTEH | 1 | 1 | |
| EVDSG | | | |
| EVSET | | | |
| GADTG | | | |
| GADTQ | | | 1 |
| CASTS | 1 | 1 | |
| GATTE | | | |
| GDGSP | | | 1 |
| GHETD | | | |
| GKAHN | | | |
| GKHGK | | | 1 |
| GNDTG | | | 1 |
| GNDTS | | | |
| GNETQ | | | |
| GNETT | 1 | 1 | |
| GNQEG | | | |
| GQGKA | | | |
| GTDGP | | | |
| GTPHW | | | |
| GVTQN | 1 | 1 | |
| HETDE | | | |
| IASTN | | | |
| IQNSG | | | |
| IQTSG | 1 | 1 | |
| ISNTT | 1 | 1 | |
| ITPNS | | | |
| ITPQA | 1 | 1 | |
| ITPQS | | | 1 |
| ITPRS | | | |
| KCPST | | | |
| KDTND | | | |
| KGEDA | | | |
| KGRLS | | | |
| KGVTQ | 1 | 1 | |
| NDTGK | | | 1 |
| NDTSN | | | |
| NEGDN | | | |
| NETQG | | | |
| NETTE | 1 | 1 | |
| NPTDT | | | |
| NQEGS | | | |
| NSGGT | | | |
| NSPRA | | | |
| NSRNT | | | |
| NTTTD | 1 | 1 | |
| PHAKK | | | 1 |
| PNSPR | | | |
| PPSE1 | | 1 | |
| PQAPP | | 1 | |
| PQAPT | 1 | | |
| PQAST | | | |
| PQSST | | | 1 |
| PRAEA | | | |
| PRSPS | | | |
| PSTGE | | | |
| PTDTG | | | |
| QAPPS | | 1 | |
| QAPTS | 1 | | |
| QASTT | | | |
| QEGSL | | | |
| QGKAH | | | |
| QNSGG | | | |
| QSSTT | | | 1 |
| QTSGT | | 1 | |
| QVGNE | | 1 | |
| RCPTQ | 1 | 1 | |
| SETQH | | | |
| SGAST | 1 | 1 | |
| SGATT | | | |
| SNTTT | 1 | 1 | |
| SPRAE | | | |
| SQETW | 1 | 1 | |
| SRCPT | 1 | 1 | |
| SRNTS | | | |
| SSTTE | | | 1 |
| STEDG | | | |
| STSQE | 1 | 1 | |
| TDENR | | | |
| TDTGH | | | |
| TEDGQ | | | |
| TEPPF | 1 | 1 | |
| TESTE | | | |
| TETPT | | | |
| TEVDS | | | |
| TGHET | | | |
| TGKHG | | | 1 |
| TGTPH | | | |
| TKDTN | | | |
| TNDNN | | | |
| TNSRN | | | |
| TPNSP | | | |
| TPQAP | 1 | 1 | |
| TPQAS | | | |
| TPQSS | | | 1 |
| TPRSP | | | |
| TQGSN | | | 1 |
| TSNHG | | | |
| TSQET | 1 | 1 | |
| TTEAE | | | 1 |
| TTEHG | 1 | 1 | |
| TTETP | | | |
| TTTDS | 1 | 1 | |
| VDSGD | | | |
| VGNDT | | | 1 |
| VGNET | 1 | 1 | |
| VSETQ | | | |
| YEGDG | | | 1 |
| YEGTD | 1 | 1 | |

| BEPIPent | JN848499_Den4_SPH318527_4 | KP858111_Den1_GO166_2013_BR) |
|---|---|---|
| ADTGT | | |
| ADTQG | | |
| AEENE | | |
| AEPPF | | |
| AGTDG | | |
| APPSE | | |
| APTSE | | 1 |
| ASTND | | |
| ASTSQ | | 1 |
| ATEVD | 1 | |
| ATTET | | |
| CPSTG | | |
| CPTQG | 1 | 1 |
| DEKGV | | 1 |
| DGQGK | | |
| DKCPS | | |
| DSGDG | 1 | |
| DSRCP | | 1 |
| DTGHE | | |
| DTGHG | | |
| DTGKH | | |
| DTGTP | | |
| DTNDN | | |
| DTQGS | | |
| DTSNH | 1 | |
| EDGQG | | |
| EENEG | | |
| EGAGA | 1 | |
| EGDGS | | |
| EGDNA | | |
| EGTDA | | 1 |
| EIQNS | | |
| EIQTS | | 1 |
| EKGVT | | 1 |
| ENEGD | | |
| ESTEN | | |
| ETDEN | | |
| ETPTW | | |
| ETTEH | | 1 |
| EVDSG | 1 | |
| EVSET | | |
| GADTG | | |
| GADTQ | | |
| CASTS | | 1 |
| GATTE | | |
| GDGSP | | |
| GHETD | | |
| GKAHN | | |
| GKHGK | | |
| GNDTG | | |
| GNDTS | 1 | |
| GNETQ | | |
| GNETT | | 1 |
| GNQEG | | |
| GQGKA | | |
| GTDGP | | |
| GTPHW | | |
| GVTQN | | 1 |
| HETDE | | |
| IASTN | | |
| IQNSG | | |
| IQTSG | | 1 |
| ISNTT | | 1 |
| ITPNS | | |
| ITPQA | | 1 |
| ITPQS | | |
| ITPRS | 1 | |
| KCPST | | |
| KDTND | | |
| KGEDA | | |
| KGRLS | | |
| KGVTQ | | 1 |
| NDTGK | | |
| NDTSN | 1 | |
| NEGDN | | |
| NETQG | | |
| NETTE | | 1 |
| NPTDT | | |
| NQEGS | | |
| NSGGT | | |
| NSPRA | | |
| NSRNT | 1 | |
| NTTTD | | 1 |
| PHAKK | | |
| PNSPR | | |
| PPSE1 | | |
| PQAPP | | |
| PQAPT | | 1 |
| PQAST | | |
| PQSST | | |
| PRAEA | | |
| PRSPS | 1 | |
| PSTGE | | |
| PTDTG | | |
| QAPPS | | |
| QAPTS | | 1 |
| QASTT | | |
| QEGSL | | |
| QGKAH | | |
| QNSGG | | |
| QSSTT | | |
| QTSGT | | 1 |
| QVGNE | | 1 |
| RCPTQ | 1 | 1 |
| SETQH | | |
| SGAST | | 1 |
| SGATT | | |
| SNTTT | | 1 |
| SPRAE | | |
| SQETW | | 1 |
| SRCPT | | 1 |
| SRNTS | 1 | |
| SSTTE | | |
| STEDG | | |
| STSQE | | 1 |
| TDENR | | |
| TDTGH | | |
| TEDGQ | | |
| TEPPF | | 1 |
| TESTE | | |
| TETPT | | |
| TEVDS | 1 | |
| TGHET | | |
| TGKHG | | |
| TGTPH | | |
| TKDTN | | |
| TNDNN | | |
| TNSRN | 1 | |
| TPNSP | | |
| TPQAP | | 1 |
| TPQAS | | |
| TPQSS | | |
| TPRSP | 1 | |
| TQGSN | | |
| TSNHG | 1 | |
| TSQET | | 1 |
| TTEAE | | |
| TTEHG | | 1 |
| TTETP | | |
| TTTDS | | 1 |
| VDSGD | 1 | |
| VGNDT | 1 | |
| VGNET | | 1 |
| VSETQ | | |
| YEGDG | | |
| YEGTD | | 1 |

TABLE 12

| | SEQ | | SEQ | | SEQ | | | | | | | Cross | SEQ | | SEQ |
|---|---|---|---|---|---|---|---|---|---|---|---|---|---|---|---|
| Yellow | ID | | ID | | ID | | SEQ ID | | SEQ ID | | SEQ ID | reactive | ID | Not | ID |
| fever | NO | Den1 | NO | Den2 | NO | Den3 | NO | Den4 | NO | Zika | NO | DEN1-4 | NO | Zika | NO |
| AEENE | SEQ | ASTSQ | SEQ | ADTQG | SEQ | ATTET | SEQ 324 | ATEVD | SEQ 349 | ADTGT | SEQ 365 | EPPFG | SEQ | GSSIG | SEQ |
| | 263 | | 283 | | 306 | | | | | | | | 387 | | 391 |
| ASTND | SEQ | DEKGV | SEQ | DTGKH | SEQ | DGQGK | SEQ 325 | DSGDG | SEQ 350 | AGTDG | SEQ 366 | ETQHG | SEQ | | |
| | 264 | | 284 | | 307 | | | | | | | | 388 | | |
| CPSTG | SEQ | EGTDA | SEQ | DTQGS | SEQ | EDGQG | SEQ 326 | DTSNH | SEQ 351 | DTGHE | SEQ 367 | KGSSI | SEQ | | |
| | 265 | | 285 | | 308 | | | | | | | | 389 | | |
| DKCPS | SEQ | EIQTS | SEQ | EGDGS | SEQ | EIQNS | SEQ 327 | EGAGA | SEQ 352 | DTGTP | SEQ 368 | QEGAM | SEQ | | |
| | 266 | | 286 | | 309 | | | | | | | | 390 | | |
| DTGHG | SEQ | EKGVT | SEQ | GADTQ | SEQ | ETPTW | SEQ 328 | EVDSG | SEQ 353 | ESTEN | SEQ 369 | | | | |
| | 267 | | 287 | | 310 | | | | | | | | | | |
| DTNDN | SEQ | ETTEH | SEQ | GDGSP | SEQ | EVSET | SEQ 329 | GNDTS | SEQ 354 | ETDEN | SEQ 370 | | | | |
| | 268 | | 288 | | 311 | | | | | | | | | | |
| EENEG | SEQ | GASTS | SEQ | GKHGK | SEQ | GATTE | SEQ 330 | ITPRS | SEQ 355 | GADTG | SEQ 371 | | | | |
| | 269 | | 289 | | 312 | | | | | | | | | | |
| EGDNA | SEQ | GNETT | SEQ | GNDTG | SEQ | GKAHN | SEQ 331 | NDTSN | SEQ 356 | GHETD | SEQ 372 | | | | |
| | 270 | | 290 | | 313 | | | | | | | | | | |
| ENEGD | SEQ | GVTQN | SEQ | ITPQS | SEQ | GNETQ | SEQ 332 | NSRNT | SEQ 357 | GTDGP | SEQ 373 | | | | |
| | 271 | | 291 | | 314 | | | | | | | | | | |
| IASTN | SEQ | IQTSG | SEQ | NDTGK | SEQ | GQGKA | SEQ 333 | PRSPS | SEQ 358 | GTPHW | SEQ 374 | | | | |
| | 272 | | 292 | | 315 | | | | | | | | | | |
| KCPST | SEQ | ISNTT | SEQ | PHAKK | SEQ | IQNSG | SEQ 334 | SRNTS | SEQ 359 | HETDE | SEQ 375 | | | | |
| | 273 | | 293 | | 316 | | | | | | | | | | |
| KDTND | SEQ | KGVTQ | SEQ | PQSST | SEQ | KGEDA | SEQ 335 | TEVDS | SEQ 360 | ITPNS | SEQ 376 | | | | |
| | 274 | | 294 | | 317 | | | | | | | | | | |
| NEGDN | SEQ | NETTE | SEQ | QSSTT | SEQ | NETQG | SEQ 336 | TNSRN | SEQ 361 | KGRLS | SEQ 377 | | | | |
| | 275 | | 295 | | 318 | | | | | | | | | | |
| NPTDT | SEQ | NTTTD | SEQ | SSTTE | SEQ | NSGGT | SEQ 337 | TPRSP | SEQ 362 | NSPRA | SEQ 378 | | | | |
| | 276 | | 296 | | 319 | | | | | | | | | | |
| NQEGS | SEQ | QTSGT | SEQ | TGKHG | SEQ | PQAST | SEQ 338 | TSNHG | SEQ 363 | PNSPR | SEQ 379 | | | | |
| | 277 | | 297 | | 320 | | | | | | | | | | |
| PSTGE | SEQ | SGAST | SEQ | TPQSS | SEQ | QASTT | SEQ 339 | VDSGD | SEQ 364 | PRAEA | SEQ 380 | | | | |
| | 278 | | 298 | | 321 | | | | | | | | | | |
| PTDTG | SEQ | SNTTT | SEQ | TQGSN | SEQ | QGKAH | SEQ 340 | | | SPRAE | SEQ 381 | | | | |
| | 279 | | 299 | | 322 | | | | | | | | | | |
| QEGSL | SEQ | SQETW | SEQ | TTEAE | SEQ | QNSGG | SEQ 341 | | | TDENR | SEQ 382 | | | | |
| | 280 | | 300 | | 323 | | | | | | | | | | |
| TDTGH | SEQ | STSQE | SEQ | | | SETQH | SEQ 342 | | | TESTE | SEQ 383 | | | | |
| | 281 | | 301 | | | | | | | | | | | | |
| TKDTN | SEQ | TEPPF | SEQ | | | SGATT | SEQ 343 | | | TGHET | SEQ 384 | | | | |
| | 282 | | 302 | | | | | | | | | | | | |
| | | TPQAP | SEQ | | | STEDG | SEQ 344 | | | TGTPH | SEQ 385 | | | | |
| | | | 303 | | | | | | | | | | | | |
| | | TSQET | SEQ | | | TEDGQ | SEQ 345 | | | TPNSP | SEQ 386 | | | | |
| | | | 304 | | | | | | | | | | | | |
| | | TTDS | SEQ | | | TETPT | SEQ 346 | | | | | | | | |
| | | | 305 | | | | | | | | | | | | |
| | | | | | | TPQAS | SEQ 347 | | | | | | | | |
| | | | | | | YKGED | SEQ 348 | | | | | | | | |

[0932] These peptides can be synthesized chemically with or without the contextual flanking regions of up to five amino acids each side and with or without histags or FLAG tags. As reagents they are used attached to a solid (paper or plastic, among other possibilities know to those skilled in the art) or semisolid (for example, but not limited to, agarose, nitrocellulose) medium or utilized in suspension in a capture mode. In addition, a secondary immunoglobulin binding colorimetric secondary antibody can facilitate test readout. By recording the pattern of binding to an array of peptides it is possible to differentiate between prior exposure of a subject to each or multiple of the viruses. An array may be very simple with only 1-5 of the peptides shown for each virus, or a subset thereof, or may incorporate up to all of the peptides in Table 12. The peptides may be used for simple clinical differential diagnosis. They may also be utilized to determine the duration of antibody titers to each peptide, in which case many or all of the peptides will be employed. For instance, the duration of antibody titers to mimics such as the pentamer ESTEN in Zika (or others described herein, so this example is not considered limiting) are important in determining when a pregnancy may be safe without risking transplacental antibody transfer adverse to fetal development. Similarly, the test kit may be used to assess vaccine efficacy in raising appropriate protective antibodies rather than those targeting mimics.

### Example 7: An Engineered Zika Vaccine Component with Multiple Mutations

[0933] In order to generate a vaccine candidate envelope protein in which antibody mediated mimicry is mitigated, we generated an envelope protein amino acid sequence in which the pentamer mimic motifs ESTEN, LGRLS, PRAEA, and GADTG were each replaced with a pentamer of different amino acids. In addition, the pentamer DRGWG was replaced as this motif is associated with potential cross reactivity with other flaviviruses leading to antibody dependent enhancement. As a result of introduction of new pentamer motifs the new sequence was reexamined to determine that the location of B and T cell motifs has not been disrupted and that the new pentamers, and those arising in the flanks of each new pentamer did not give rise to new problematic mimics. Hence for each pentamer replaced a minimum of 9 new pentamers were evaluated for new mimics. Therefore, the analysis of B cell epitope mimics was repeated with the novel sequences. Sequences 392 to 397 provide the sequences for a preferred envelope protein with the mimics replaced. It will be evident to those skilled in the art that other replacement pentamers may be equally suitable and thus these sequences provide examples which are not considered limiting. The envelope proteins comprising the mimics may be incorporated into vaccines using one of many delivery vehicles known to the art as previously discussed, including but not limited to Fc fusions, virus like particles, vectored via adeno or poxviruses, chimeras, or as DNA. Thus the inclusion of Fc fusion examples in the sequences shown is not considered limiting.

[0934] Seq.392. His-EKL-Soluble-Nucleotide Sequence

[0935] 1-63 Signal peptide

[0936] 70-87 6× His Tag

[0937] 88-111 Enterokinase linker

[0938] 112-1332 Soluble envelope with 5 mutations

[0939] Seq.393. His-EKL-Soluble-Amino Acid Sequence

[0940] 1-21 Signal peptide

[0941] 22-29 6× His Tag

[0942] 30-37 Enterokinase linker

[0943] 38-444 Soluble envelope with 5 mutations

[0944] Seq.394. Soluble Nucleotide Sequence

[0945] 1-63 Signal peptide

[0946] 69-1287 Soluble envelope with 5 mutations

[0947] 1288-1311 Enterokinase linker

[0948] 1312-2016 hG1 (CH2-CH3) constant region

[0949] Seq.395. Soluble Amino Acid Sequence

[0950] 1-21 Signal peptide

[0951] 23-429 Soluble envelope with 5 mutations

[0952] 430-437 Enterokinase linker

[0953] 438-672 hG1 (CH2-CH3) constant region

[0954] Seq.396. His-Soluble Nucleotide Sequence

[0955] 1-63 Signal peptide

[0956] 72-87 6× His Tag

[0957] 88-1305 Soluble envelope with 5 mutations

[0958] 1306-1329 Enterokinase Linker

[0959] 1336-2037 mG2a(CH2-CH3) constant region

[0960] Seq.397. His-Soluble Amino Acid Sequence

[0961] 1-21 Signal peptide

[0962] 24-29 6× His Tag

[0963] 30-435 Soluble envelope with 5 mutations

[0964] 436-443 Enterokinase Linker

[0965] 446-679 mG2a(CH2-CH3) constant region

[0966] In addition to preparing components of the envelope as standalone ZIKV envelope domain sequences and as immunoglobulin fusions, subviral particles were also constructed comprising PrMEnv. This was conducted generally following the methods of Merino-Ramos et al (PLoS ONE 9(9): e108056. doi: 10.1371. Sub viral particles were constructed which comprised mutant versions of four of the above referenced mimic peptides (PRAEA, AGADT, KGRLS, ESTEN) and also with only the Domain II pan flavi cross reactive motif DRGWG. In addition, control sequences which contained no motif changes from the wild type were constructed also as subviral particles. These are shown below as SEQS 257-262. The sequences were transfected into Vero and CHO cells and subviral particles expressed for testing of their immunogenicity in mice.

[0967] Seq.257.jeSP-prME(NGWGRD), Nucleotide Sequence

[0968] 1-72 Signal peptide

[0969] 77-1809 ZikV prME with NGWGRD mutation

[0970] Seq.258. jeSP-prME(NGWGRD), Amino Acid Sequence

[0971] 1-24 Signal peptide

[0972] 25-603 ZikV prME with NGWGRD mutation

[0973] Seq.259.jeSP-prME(PEARA-GEKAP-LRKGS-NTSEE), Nucleotide Sequence

[0974] 1-72 Signal peptide

[0975] 77-1809 ZikV prME with PEARA-GEKAP-LRKGS-NTSEE mutations

[0976] Seq.260. jeSP-prME(PEARA-GEKAP-LRKGS-NTSEE), Amino Acid Sequence

[0977] 1-24 Signal peptide

[0978] 25-603 ZikV prME with PEARA-GEKAP-LRKGS-NTSEE mutations

[0979] Seq.261.jeSP-prME, Nucleotide Sequence

[0980] 1-72 Signal peptide

[0981] 77-1809 ZikV prME

[0982] Seq.262. ZikV prME, Amino Acid Sequence

[0983] 1-24 Signal peptide

[0984] 25-603 ZikV prME

### Example 8: Synthetic and Engineered Neurologic Proteins

[0985] The human proteins of neurologic function which contain epitope mimics for Zika virus have been identified above. In order to evaluate the role of such mimic epitopes in the pathogenesis of Zika virus and dengue we developed recombinant versions of the neurologic proteins of interest in which the wild type epitope motif is retained and versions in which one or more of the epitope mimics for Zika or dengue is replaced. In addition, control motifs are included for yellow fever and tetanus toxin. Sequences 173-182 provide an example of such sequences for neuropeptide Y. A further set of recombinant proteins was developed which are based on NAV 2 and which include the wild type and replacement pentamers for the predicted mimics, KGRLS (Zika) and TDKEK (dengue 1). Given the size of NAV2, over 2800 amino acids, we elected in this example to only use the central portion of the protein spanning both Zika and dengue 1 mimics. This is shown in Sequence 235 to 244. A similar approach is taken with other human proteins containing mimic epitopes for Zika or dengue and thus the examples shown for NAV2 and NPY are not limiting.

[0986] In a further embodiment the synthetic neurologic proteins are expressed as a fusion with an immunoglobulin Fc region. In yet another embodiment the synthetic polypeptide derived from neuropeptide Y is mutated to prevent the cleavage of mature NPY from the CPON component. These modifications of the proteins are shown in SEQS 398 to 437.

[0987] Seq.398. His-NAV2(KGRLS-TDKEK)-EKL-mG2a(CH2-CH3), Nucleotide Sequence

[0988] 1-63 Signal peptide

[0989] 70-87 6× His Tag

[0990] 88-807 Neuron Navigator 2

[0991] 808-831 Enterokinase Linker

[0992] 838-1539 mG2a(CH2-CH3) constant region

[0993] Seq.399. His-NAV2(KGRLS-TDKEK)-EKL-mG2a(CH2-CH3), Amino Acid Sequence

[0994] 1-21 Signal peptide

[0995] 22-29 6× His Tag

[0996] 30-269 Neuron Navigator 2

[0997] 270-277 Enterokinase Linker

[0998] 278-513 mG2a(CH2-CH3) constant region

[0999] Seq.400. His-NAV2(LRKGS-TDKEK)-EKL-mG2a(CH2-CH3), Nucleotide Sequence

[1000] 1-63 Signal peptide

[1001] 70-87 6× His Tag

[1002] 88-807 Neuron Navigator 2

[1003] 808-831 Enterokinase Linker

[1004] 838-1539 mG2a(CH2-CH3) constant region

[1005] Seq.401. His-NAV2(LRKGS-TDKEK)-EKL-mG2a(CH2-CH3), Amino Acid Sequence

[1006] 1-21 Signal peptide

[1007] 22-29 6× His Tag

[1008] 30-269 Neuron Navigator 2

[1009] 270-277 Enterokinase Linker

[1010] 278-513 mG2a(CH2-CH3) constant region

[1011] Seq.402. His-NAV2(KGRLS-DTREK)-EKL-mG2a(CH2-CH3), Nucleotide Sequence

[1012] 1-63 Signal peptide

[1013] 70-87 6× His Tag

[1014] 88-807 Neuron Navigator 2

[1015] 808-831 Enterokinase Linker

[1016] 838-1539 mG2a(CH2-CH3) constant region

[1017] Seq.403. His-NAV2(KGRLS-DTREK)-EKL-mG2a(CH2-CH3), Amino Acid Sequence

[1018] 1-21 Signal peptide

[1019] 22-29 6× His Tag

[1020] 30-269 Neuron Navigator 2

[1021] 270-277 Enterokinase Linker

[1022] 278-513 mG2a(CH2-CH3) constant region

[1023] Seq.404. His-NAV2(STNDD-DTREK)-EKL-mG2a(CH2-CH3), Nucleotide Sequence

[1024] 1-63 Signal peptide

[1025] 70-87 6× His Tag

[1026] 88-807 Neuron Navigator 2

[1027] 808-831 Enterokinase Linker

[1028] 838-1539 mG2a(CH2-CH3) constant region

[1029] Seq.405. His-NAV2(STNDD-DTREK)-EKL-mG2a(CH2-CH3), Amino Acid Sequence

[1030] 1-21 Signal peptide

[1031] 22-29 6× His Tag

[1032] 30-269 Neuron Navigator 2

[1033] 270-277 Enterokinase Linker

[1034] 278-513 mG2a(CH2-CH3) constant region

[1035] Seq.406. His-NAV2(SL15-DTREK)-EKL-mG2a(CH2-CH3), Nucleotide Sequence

[1036] 1-63 Signal peptide

[1037] 70-87 6× His Tag

[1038] 88-837 Neuron Navigator 2

[1039] 838-861 Enterokinase Linker

[1040] 868-1569 mG2a(CH2-CH3) constant region

[1041] Seq.407. Heavy Chain Variable Region, Amino Acid Sequence, ID:500p

[1042] 1-21 Signal peptide

[1043] 22-29 6× His Tag

[1044] 30-279 Neuron Navigator 2

[1045] 280-287 Enterokinase Linker

[1046] 288-523 mG2a(CH2-CH3) constant region

[1047] Seq.408. mG2a(CH2-CH3)-EKL-NAV2(KGRLS-TDKEK)-His, Nucleotide Sequence

[1048] 1-63 Signal peptide

[1049] 70-768 mG2a(CH2-CH3) constant region

[1050] 778-801 Enterokinase Linker

[1051] 802-1521 Neuron Navigator 2

[1052] 1522-1539 6× His Tag

[1053] Seq.409. mG2a(CH2-CH3)-EKL-NAV2(KGRLS-TDKEK)-His, Amino Acid Sequence

[1054] 1-21 Signal peptide

[1055] 22-256 mG2a(CH2-CH3) constant region

[1056] 260-267 Enterokinase Linker

[1057] 268-507 Neuron Navigator 2

[1058] 508-513 6× His Tag

[1059] Seq.410. mG2a(CH2-CH3)-EKL-NAV2(LRKGS-TDKEK)-His, Nucleotide Sequence

[1060] 1-63 Signal peptide

[1061] 70-768 mG2a(CH2-CH3) constant region

[1062] 778-801 Enterokinase Linker

[1063] 802-1521 Neuron Navigator 2

[1064] 1522-1539 6× His Tag

[1065] Seq.411. mG2a(CH2-CH3)-EKL-NAV2(LRKGS-TDKEK)-His, Amino Acid Sequence

[1066] 1-21 Signal peptide

[1067] 22-256 mG2a(CH2-CH3) constant region

[1068] 260-267 Enterokinase Linker

[1069] 268-507 Neuron Navigator 2

[1070] 508-513 6× His Tag

[1071] Seq.412. mG2a(CH2-CH3)-EKL-NAV2(KGRLS-DTREK)-His, Nucleotide Sequence

[1072] 1-63 Signal peptide

[1073] 70-768 mG2a(CH2-CH3) constant region

[1074] 778-801 Enterokinase Linker

[1075] 802-1521 Neuron Navigator 2

[1076] 1522-1539 6× His Tag

[1077] Seq.413. mG2a(CH2-CH3)-EKL-NAV2(KGRLS-DTREK)-His, Amino Acid Sequence

[1078] 1-21 Signal peptide

[1079] 22-256 mG2a(CH2-CH3) constant region

[1080] 260-267 Enterokinase Linker

[1081] 268-507 Neuron Navigator 2

[1082] 508-513 6× His Tag

[1083] Seq.414. mG2a(CH2-CH3)-EKL-NAV2(STNDD-DTREK)-His, Nucleotide Sequence

[1084] 1-63 Signal peptide

[1085] 70-768 mG2a(CH2-CH3) constant region

[1086] 778-801 Enterokinase Linker

[1087] 802-1521 Neuron Navigator 2

[1088] 1522-1539 6× His Tag

[1089] Seq.415. mG2a(CH2-CH3)-EKL-NAV2(STNDD-DTREK)-His, Amino Acid Sequence

[1090] 1-21 Signal peptide

[1091] 22-256 mG2a(CH2-CH3) constant region

[1092] 260-267 Enterokinase Linker

[1093] 268-507 Neuron Navigator 2

[1094] 508-513 6× His Tag

[1095] Seq.416. mG2a(CH2-CH3)-EKL-NAV2(SL15-DTREK)-His, Nucleotide Sequence

[1096] 1-63 Signal peptide

[1097] 70-768 mG2a(CH2-CH3) constant region

[1098] 778-801 Enterokinase Linker

[1099] 802-1551 Neuron Navigator 2

[1100] 1552-1569 6× His Tag

[1101] Seq.417. mG2a(CH2-CH3)-EKL-NAV2(SL15-DTREK)-His, Amino Acid Sequence

[1102] 1-21 Signal peptide

[1103] 22-256 mG2a(CH2-CH3) constant region

[1104] 260-267 Enterokinase Linker

[1105] 268-517 Neuron Navigator 2

[1106] 518-523 6× His Tag

[1107] Seq.418. His-hNPYmod(GEDAP-ESTEN)-EKL-mG2a(CH2-CH3), Nucleotide Sequence

[1108] 1-63 Signal peptide

[1109] 70-87 6× His Tag

[1110] 88-300 hNPY modified

[1111] 301-324 Enterokinase Linker

[1112] 331-1029 mG2a(CH2-CH3) Constant region

[1113] Seq.419. His-hNPYmod(GEDAP-ESTEN)-EKL-mG2a(CH2-CH3), Amino Acid Sequence

[1114] 1-21 Signal peptide

[1115] 24-29 6× His Tag

[1116] 30-100 hNPY modified

[1117] 101-108 Enterokinase Linker

[1118] 111-343 mG2a(CH2-CH3) Constant region

[1119] Seq.420. His-hNPYmod(PDAEG-ESTEN)-EKL-mG2a(CH2-CH3), Nucleotide Sequence

[1120] 1-63 Signal peptide

[1121] 70-87 6× His Tag

[1122] 88-300 hNPY modified

[1123] 301-324 Enterokinase Linker

[1124] 331-1029 mG2a(CH2-CH3) Constant region

[1125] Seq.421. His-hNPYmod(PDAEG-ESTEN)-EKL-mG2a(CH2-CH3), Amino Acid Sequence

[1126] 1-21 Signal peptide

[1127] 24-29 6× His Tag

[1128] 30-100 hNPY modified

[1129] 101-108 Enterokinase Linker

[1130] 111-343 mG2a(CH2-CH3) Constant region

[1131] Seq.422. His-hNPYmod(GEDAP-NTSEE)-EKL-mG2a(CH2-CH3), Nucleotide Sequence

[1132] 1-63 Signal peptide

[1133] 70-87 6× His Tag

[1134] 88-300 hNPY modified

[1135] 301-324 Enterokinase Linker

[1136] 331-1029 mG2a(CH2-CH3) Constant region

[1137] Seq.423. His-hNPYmod(GEDAP-NTSEE)-EKL-mG2a(CH2-CH3), Amino Acid Sequence

[1138] 1-21 Signal peptide

[1139] 24-29 6× His Tag

[1140] 30-100 hNPY modified

[1141] 101-108 Enterokinase Linker

[1142] 111-343 mG2a(CH2-CH3) Constant region

[1143] Seq.424. His-hNPYmod(PDAEG-STNDD)-EKL-mG2a(CH2-CH3), Nucleotide Sequence

[1144] 1-63 Signal peptide

[1145] 70-87 6× His Tag

[1146] 88-300 hNPY modified

[1147] 301-324 Enterokinase Linker

[1148] 331-1029 mG2a(CH2-CH3) Constant region

[1149] Seq.425. His-hNPYmod(PDAEG-STNDD)-EKL-mG2a(CH2-CH3), Amino Acid Sequence

[1150] 1-21 Signal peptide

[1151] 24-29 6× His Tag

[1152] 30-100 hNPY modified

[1153] 101-108 Enterokinase Linker

[1154] 111-343 mG2a(CH2-CH3) Constant region

[1155] Seq.426. His-hNPYmod(PDAEG-tetSL15)-EKL-mG2a(CH2-CH3), Nucleotide Sequence

[1156] 1-63 Signal peptide

[1157] 70-87 6× His Tag

[1158] 88-330 hNPY modified

[1159] 331-354 Enterokinase Linker

[1160] 361-1059 mG2a(CH2-CH3) Constant region

[1161] Seq.427. His-hNPYmod(PDAEG-tetSL15)-EKL-mG2a(CH2-CH3), Amino Acid Sequence

[1162] 1-21 Signal peptide

[1163] 24-29 6× His Tag

[1164] 30-110 hNPY modified

[1165] 111-118 Enterokinase Linker

[1166] 121-353 mG2a(CH2-CH3) Constant region

[1167] Seq.428. mG2a(CH2-CH3)-EKL-hNPYmod(GEDAP-ESTEN)-His, Nucleotide Sequence

[1168] 1-63 Signal peptide

[1169] 70-768 mG2a(CH2-CH3) Constant Region

[1170] 778-801 Enterokinase Linker

[1171] 802-1014 hNPY modified

[1172] 1015-1032 6× His Tag

[1173] Seq.429. mG2a(CH2-CH3)-EKL-hNPYmod(GEDAP-ESTEN)-His, Amino Acid Sequence

[1174] 1-21 Signal peptide

[1175] 24-256 mG2a(CH2-CH3) Constant Region

[1176] 260-267 Enterokinase Linker

[1177] 268-338 hNPY modified

[1178] 339-344 6× His Tag

[1179] Seq.430. mG2a(CH2-CH3)-EKL-hNPYmod(PDAEG-ESTEN)-His, Nucleotide Sequence

[1180] 1-63 Signal peptide

[1181] 70-768 mG2a(CH2-CH3) Constant Region

[1182] 778-801 Enterokinase Linker

[1183] 802-1014 hNPY modified

[1184] 1015-1032 6× His Tag

[1185] Seq.431. mG2a(CH2-CH3)-EKL-hNPYmod(PDAEG-ESTEN)-His, Amino Acid Sequence

[1186] 1-21 Signal peptide

[1187] 24-256 mG2a(CH2-CH3) Constant Region

[1188] 260-267 Enterokinase Linker

[1189] 268-338 hNPY modified

[1190] 339-344 6× His Tag

[1191] Seq.432. mG2a(CH2-CH3)-EKL-hNPYmod(GEDAP-NTSEE)-His, Nucleotide Sequence

[1192] 1-63 Signal peptide

[1193] 70-768 mG2a(CH2-CH3) Constant Region

[1194] 778-801 Enterokinase Linker

[1195] 802-1014 hNPY modified

[1196] 1015-1032 6× His Tag

[1197] Seq.433. mG2a(CH2-CH3)-EKL-hNPYmod(GEDAP-NTSEE)-His, Amino Acid Sequence

[1198] 1-21 Signal peptide

[1199] 24-256 mG2a(CH2-CH3) Constant Region

[1200] 260-267 Enterokinase Linker

[1201] 268-338 hNPY modified

[1202] 339-344 6× His Tag

[1203] Seq.434. mG2a(CH2-CH3)-EKL-hNPYmod(PDAEG-STNDD)-His, Nucleotide Sequence

[1204] 1-63 Signal peptide

[1205] 70-768 mG2a(CH2-CH3) Constant Region

[1206] 778-801 Enterokinase Linker

[1207] 802-1014 hNPY modified

[1208] 1015-1032 6× His Tag

[1209] Seq.435. mG2a(CH2-CH3)-EKL-hNPYmod(PDAEG-STNDD)-His, Amino Acid Sequence

[1210] 1-21 Signal peptide

[1211] 24-256 mG2a(CH2-CH3) Constant Region

[1212] 260-267 Enterokinase Linker

[1213] 268-338 hNPY modified

[1214] 339-344 6× His Tag

[1215] Seq.436. mG2a(CH2-CH3)-EKL-hNPYmod(PDAEG-tetSLIS)-His, Nucleotide Sequence

[1216] 1-63 Signal peptide

[1217] 70-768 mG2a(CH2-CH3) Constant Region

[1218] 778-801 Enterokinase Linker

[1219] 802-1044 hNPY modified

[1220] 1045-1062 6× His Tag

[1221] Seq.437. mG2a(CH2-CH3)-EKL-hNPYmod(PDAEG-tetSL15)-His, Amino Acid Sequence

[1222] 1-21 Signal peptide

[1223] 24-256 mG2a(CH2-CH3) Constant Region

[1224] 260-267 Enterokinase Linker

[1225] 268-348 hNPY modified

[1226] 349-354 6× His Tag

[1227] Retrovector constructs containing each of the SEQS 173-182, SEQs 235-244 and SEQs 398-437 are then used to transfect CHO cells and achieve stable integration and expression as previously described (U.S. Pat. Nos. 8,703,134; 8,394,379; 7,566,447; and 20130230516; each of which is incorporated herein by reference in its entirety). Other methods of expression known to the art may be used.

[1228] FIG. 16 provides a summary of the constructs for NPY and NAV2 showing the arrangement of wild type and scrambled motifs and the expected responses from individuals exposed to Zika and/or dengue. Again, similar arrangements of wild type and scrambled motifs in synthetic versions of other proteins containing antibody mediated mimics of Zika may be constructed and expressed.

[1229] A particular application of these constructs derived from NPY and NAV2, and from other mimic epitope bearing human proteins, in addition to being applied in validation of epitope mimic predictions, is to serve as a detection system for anti Zika antibodies which have binding to these human proteins with potential adverse effect. As such the engineered human proteins with mimics and scrambled mimics serve as a tool in the detection of antibodies as a surrogate marker of probability of development of GBS or fetal syndrome or other adverse neuropathology arising from Zika infection.

[1230] The method of detection of binding of anti Zika antibodies to the synthetic polypeptides may be any assay well known to those skilled in the art including but not limited to ELISA assays, or Western blots.

### Example 9: Mimic Peptides in Non Structural Proteins of Zika Virus

[1231] We analyzed the predicted B cell epitopes of Zika proteins in comparison with human proteome proteins which are identified as having an association with microcephaly. A sub set of the human proteome was selected based on the presence of the term “microcephaly” anywhere in the Uniprot descriptor. Based on this approach a number of matches of pentamer motifs found in flaviviruses were identified. Some matches are found very widely in all flaviviruses; these were discounted. High probability epitope mimics found in Zika virus SPH2015 are shown in Table

TABLE 13

| Zika | SEQ | Mimic | |
|---|---|---|---|
| protein | Number | motif | Human protein target |
| PrM | SEQ 452 | SSTSQ | CDKRap2 (UniProt |
| | | | B1AMJ5) |
| NS1 | SEQ 453 | STTAS | ASPM |
| NS3 | SEQ 454 | RREEE | CDKRap2 (UniProt |
| | | | B1AMJ5) |
| NS4B | SEQ 455 | AAQKR | ASPM |
| NS4B | SEQ 456 | GESSS | CEP135 |

[1232] Zika virus NS1 was found to have a particularly unique match to Abnormal spindle like microcephaly associated protein (ASPM), mutations of which are highly associated with microcephaly (FIGS. 19-20).

[1233] NS1 is Immunogenic in Flaviviruses

[1234] NS1 is secreted from flaviviral infected cells as a dimer, it is released into circulation but some also remains associated with the plasma membrane of the cells. NS1 may be secreted at very high levels into serum, depending on flaviviral strain, with up to 50 ug/ml having been reported in the serum of dengue type 2 patients [55-57]. In most well understood flaviviral infections patients, non structural protein 1 (NS1) induces high levels of antibodies [58]. The presence of antibody mimic epitopes in dengue NS1 is well documented, with antibodies elicited by NS1 binding to endothelium and clotting factors [59, 60].

[1235] When we compare flaviviral predicted B cell epitopes to human proteins involved in cardiovascular functions, our observations confirm the presence of epitope mimics in dengue NS1 including B cell epitopes which elicit antibodies matching B cell epitopes in coagulation factors VII, VIII, X, vascular endothelial growth factors (VEGF), plasminogen, thrombospondin and von Willebrand (VWF) factor and others.

[1236] NS1 Contains a B Cell Epitope which Comprises the Motif STTAS and which has Strong T Cell Help

[1237] Zika virus however is different from other flaviviruses in that while its NS1 does have a lesser set of mimics for VEGF and VWF than dengue, it also has a particular B cell epitope which comprises the motif STTAS, centered at amino acid position 303 of NS1 (FIGS. 17 and 18). This motif matches an B cell epitope in human Abnormal spindle like microcephaly associated protein (ASPM) (FIG. 19). The STTAS motif is conserved in all NS1 and all polyproteins from all Zika isolates available to date. In particular, the motif STTAS is located on a highly exposed loop of NS1 which remains exposed even when NS1 is dimerized (FIG. 20) [61]. Adjacent to the STTAS motif in Zika NS1 is a sequence comprising high MHC II binding, especially for DQ alleles but also for the majority of DRB alleles, ensuring good T cell help. The corresponding B cell epitope motif is absent from other flaviviruses and, with one exception, 14 other flaviviruses examined (comprising exemplars of DEN 1-4 and YF, TBEV, JEV and WNV) have no motifs matching ASPM. The exception is WNV which has a motif RGPAA centered at amino acid 296 in the NS1 loop.

[1238] NS1 proteins of Zika virus are therefore proteins which are likely secreted in large amounts, are highly immunogenic, and have a domain B cell epitope which elicits antibodies that are predicted to bind a B cell epitope on ASPM. In addition, the presence of the matching peptide motif in NS1 during replication in neurons may bind and compromise functions of ASPM directly.

[1239] Although examination of Zika virus isolates over the years shows multiple mutations in NS1, the loop comprising the motifs of interest is highly conserved, lying in a loop between multiple disulphide bonds [61].

[1240] ASPM is Associated with Microcephaly

[1241] Abnormal spindle microcephaly associated protein ASPM, otherwise known as MCPH5, is a major determinant of cortical size [62]. Homozygous recessive mutations of ASPM are the defect most commonly associated with genetic based microcephaly. Mutations in ASPM are the most frequent cause of microcephaly [63]. ASPM is preferentially expressed in the developing brain [64]. ASPM is a large protein, 3477 amino acids long which comprises two distinct regions, a N terminal region of ˜869 amino acids followed by a number of higher order repeated sequences configured as IQXXXRGXXXR, which vary between isoforms and between species and occupy the C terminal half of the protein. The number of repeats appears to be linked to brain size. ASPM locates bound to the spindle with the first 960 amino acids being the tubule binding domain. The STTAS motif is located within this region (FIG. 21). There are multiple isoforms of ASPM, which differ in the number of higher order repeats they contain in their C terminal half.

[1242] ASPM is closely associated with the mitotic spindle and may control the symmetry of proliferation in progenitor cells. It appears to control chromosomal segregation and is essential to allow fetal stem cells to produce neurons[64]. ASPM may also control neuronal migration [65]. The role of ASPM in non-neuronal cells is less clear. No defects other than microcephaly are found in patients carrying mutations of this ASPM. Hence it only appears essential for neuronal mitogenesis.

[1243] The presence of antibodies binding ASPM would likely compromise or inhibit its function, thereby compromising its role in spindle formation and chromosome segregation, especially in neuronal cells. It is also possible that an excess of NS1 bearing the homologous peptide motif may compromise interactions with other spindle proteins.

[1244] STTAS in ASPM is Located in the Conserved Spindle Binding Region

[1245] STTAS, the motif which corresponds to a B cell epitope in Zika NS1 is centered at amino acid 567. Notably the motif RGPAA, found in WNV is centered at amino acid position 27, very close to the N terminal. The motif STTAS is also found in a B cell epitope in ASPM.

[1246] Only full length isoforms of human ASPM carry the motif http://www.uniprot.org/uniprot/Q8IZT6. STTAS is found in ASPM of Gorilla and chimpanzee and several other species of Old World Monkeys but not in other mammals. Macaques and Aotus carry a near neighbor motif LTTAS. Mice and other commonly used lab rodents do not have a similar motif, precluding direct testing of the impact of NS1 or antibodies thereto.

[1247] Uniprot lists the known functions of ASPM as the following:

[1248] cerebral cortex development

[1249] developmental growth

[1250] forebrain neuroblast division

[1251] maintenance of centrosome location

[1252] male gonad development

[1253] mitotic nuclear division

[1254] negative regulation of asymmetric cell division

[1255] negative regulation of neuron differentiation

[1256] neuronal stem cell population maintenance

[1257] neuron migration

[1258] oogenesis

[1259] positive regulation of canonical Wnt signaling pathway

[1260] positive regulation of neuroblast proliferation

[1261] regulation of meiotic cell cycle

[1262] spermatogenesis

[1263] spindle assembly involved in meiosis

[1264] spindle localization

[1265] spindle organization

[1266] Diagnostics based on the NS1 mimic motifs:

[1267] Identification of antibodies in a pregnant woman following Zika infection, wherein said antibodies are directed to ASPM is therefore likely indicative of risk of the fetus developing microcephaly. In one embodiment therefore we provide a diagnostic test comprising the peptide STTAS or an extended peptide comprising this motif, comprising GPSLRSTTASGRVIE. In addition, we provide a recombinant form of NS1 firstly comprising the wildtype motif STTAS and an alternate version in which this is replaced by MTTVM. This allows the demonstration of epitope specific binding to the motif of interest.

[1268] We further provide a synthetic polypeptide derived from ASPM which may identify antibodies elicited in response to Zika NS1. As controls we also provide two such polypeptides, one with a scrambled motif and one in which the Zika motif is replaced by a Yellow fever motif. It will be recognized by those skilled in the art that the immediate context of the mimic motifs is of importance but that the length of the surrounding polypeptide is selected for convenience and that various mutant or scrambled motifs may be designed. Hence the examples in Table 14 below are not considered limiting.

TABLE 14
Synthetic peptides and polyproteins of utility in
detection of antibodies to NS1:

| SEQ number | Sequence | Utility |
|---|---|---|
| 1239 | STTAS | detection |
| 1240 | GPSLRSTTASGRVIE | detection |
| 1241 | GPSLRMTMVSGRVIE | Control |
| 1242 | SAVGEHEKVINNQKEKEDFHSYLPIIDPILSKSKSYKNEVTPSSTTA | ASPM detection |
| | SVARKRKSDGMEDANVRVAITEHTEVREIKRIHFSPSEP | |
| 1243 | SAVGEHEKVINNQKEKEDFHSYLPIIDPILSKSKSYKNEVTPSMTM | ASPM control |
| | VSVARKRKSDGMEDANVRVAITEHTEVREIKRIHFSPSEP | |
| 1244 | SAVGEHEKVINNQKEKEDFHSYLPIIDPILSKSKSYKNEVTPSSTTD | Yellow fever |
| | SVARKRKSDGMEDANVRVAITEHTEVREIKRIHFSPSEP | control |

[1269] NS1 Based Vaccines

[1270] The majority of vaccines designed to combat flaviviruses have utilized the envelope and membrane proteins. However, concerns regarding incomplete understanding of antibody interactions between serotypes of dengue have led to the evaluation of dengue vaccines comprising the NS1 protein [66, 67]. These have included DNA vaccines which have demonstrated capability to raise high levels of anti-NS1 antibody in mice, which is itself partially protective following passive transfer. Similar observations of passive protection by antibodies to NS1 are reported for West Nile virus [68]. The presence of adverse motifs in NS1 is therefore of concern and must be understood before vaccine comprising NS1 of Zika is developed.

[1271] To overcome this concern, in one embodiment of the present invention we provide synthetic versions of NS1, or apportion thereof, in which the STTAS mimic is replaced. Such polypeptides may be designed to contain other motifs, hence the example shown is not limiting. Furthermore, such a NS1 based vaccine may be formulated as a protein, a protein fusion, a component of a chimera, a virus like particle or as a nucletotide sequence. In one particular embodiment shown below we express the synthetic polypeptide of NS1 as an immunoglobulin Fc-fusion.

[1272] Seq.438. NS1-EKL-hG1(CH2-CH3), Nucleotide Sequence

[1273] 1-60 Signal peptide

[1274] 61-1152 NS1

[1275] 1153-1176 Enterokinase Linker

[1276] 1177-1881 hG1 (CH2-CH3) Constant region

[1277] Seq.439. NS1-EKL-hG1(CH2-CH3), Amino Acid Sequence

[1278] 1-20 Signal peptide

[1279] 21-384 NS1

[1280] 385-392 Enterokinase Linker

[1281] 393-627 hG1(CH2-CH3) Constant region

[1282] Seq.440. NS1_M4-EKL-hG1(CH2-CH3), Nucleotide Sequence

[1283] 1-60 Signal peptide

[1284] 61-1152 NS1_M4 mutant

[1285] 1153-1176 Enterokinase Linker

[1286] 1177-1881 hG1(CH2-CH3) Constant region

[1287] Seq.441. NS1_M4-EKL-hG1(CH2-CH3), Amino Acid Sequence

[1288] 1-20 Signal peptide

[1289] 21-384 NS1 M4 mutant

[1290] 385-392 Enterokinase Linker

[1291] 393-627 hG1(CH2-CH3) Constant region

[1292] Seq.442. NS1_Partial-EKL-hG1(CH2-CH3), Nucleotide Sequence

[1293] 1-60 Signal peptide

[1294] 61-639NS1 partial

[1295] 640-663 Enterokinase Linker

[1296] 664-1368 hG1(CH2-CH3) Constant region

[1297] Seq.443. NS1_Partial-EKL-hG1(CH2-CH3), Amino Acid Sequence

[1298] 1-20 Signal peptide

[1299] 21-213 NS1 partial

[1300] 214-221 Enterokinase Linker

[1301] 222-456 hG1 (CH2-CH3) Constant region

[1302] Seq.444. NS1_M4_Partial-EKL-hG1(CH2-CH3), Nucleotide Sequence

[1303] 1-60 Signal peptide

[1304] 61-639 NS1_M4 partial

[1305] 640-663 Enterokinase Linker

[1306] 664-1368 hG1(CH2-CH3) Constant region

[1307] Seq.445. NS1_M4_Partial-EKL-hG1(CH2-CH3), Amino Acid Sequence

[1308] 1-20 Signal peptide

[1309] 21-213 NS1 M4 partial

[1310] 214-221 Enterokinase Linker

[1311] 222-456 hG1(CH2-CH3) Constant region

### Example 10: Development of Serodiagnostic Kits to Differentiate Flavivirus Infections

[1312] As a broader understanding of the spread and co-endemnicity of Zika virus has emerged, the need for a specific serologic diagnostic kit which can differentiate not only antibodies from infection with Zika from those arising from infections with dengue serotypes and yellow fever, but also from chikungunya and West Nile virus has become apparent. There is also utility to being able to differentiate IgG and IgM responses. With this goal we further evaluated the high probability B cell epitopes in exemplars each of these viruses and selected 6-15 pentamer B cell epitopes for each envelope protein and each NS1 protein. The 15 mer peptides within which these pentamers form the central five amino acids were also recorded. In the case of chikungunya 8 15mer peptides, each comprising a high probability B cell epitope pentamers were selected from the E2 protein. These peptides (the “diagnostic set”) can be used singly in an array, or as a pool for each virus, to identify antibodies to each of these viruses and to differentiate from antibodies to the other viruses in the diagnostic set.

[1313] For each virus a representative a set of isolates was then assembled, comprising 20->200 isolates for each virus. These included both polyproteins and envelope sequences, and polyproteins and NS1 proteins as shown in Table 15, as well as 30 isolates of chikungunya virus. These sets of proteins sequences were curated to ensure they were complete, or near complete, sequences and to exclude any duplicate isolates. The resultant database of sequences for each virus was interrogated by the diagnostic set of epitope pentamers to determine how conserved each of the selected pentamers is across all isolates of the same or other flaviviruses and chikungunya and to identify any potential cross reactions. This process was repeated for both pentamers derived from the envelope proteins and for pentamers derived from NS1. The results are shown in Table 16 and 17 and in FIGS. 22 and 23. A further small set of pan-dengue or pan-flavi pentamer peptides were identified as comprising B cell epitopes which are present in either all dengue isolates or in all flaviviruses and which may therefore have utility in identifying exposure to the virus family. These analyses were subsequently extended to include Usutu virus as shown in Table 33 below

TABLE 15
Tally of envelope and NS1 searched for cross reacting motifs

| | Downloaded | | Species of | |
|---|---|---|---|---|
| | from VIPR | Source | origin | Curated * |
| Dengue | 254 polyprotein | S America | Human | 192 envelope |
| type1 | and Envelope 95 | | | 74NS1 |
| | polyprotein and NS1 | | | |
| Dengue | 357 polyprotein | S America | Human | 215 envelope |
| type 2 | and Envelope 129 | | | 107 NS1 |
| | polyprotein and NS1 | | | |
| Dengue | 309 polyprotein | S America | Human | 208 envelope |
| type 3 | and Envelope 203 | | | 160 NS1 |
| | polyprotein and NS1 | | | |
| Dengue | 495 polyprotein | S America | Human | 433 envelope |
| type 4 | and Envelope 39 | | | 29 NS1 |
| | polyprotein and NS1 | | | |
| Yellow | 71 polyprotein | All | All | 48 envelope |
| fever | and Envelope 82 | countries | isolates | 72 NS1 |
| | polyprotein and NS1 | | | |
| WNV | 714 polyprotein | North and | Human | 51 envelope |
| | and Envelope 82 | South | | 52 NS1 |
| | polyprotein and NS1 | America | | |
| Zika | 154 polyprotein | Americas | Human | 41 envelope |
| | and Envelope 61 | French | | 47 NS1 |
| | polyprotein and NS1 | Polynesia | | |
| Chikungunya | 46 E2 protein | Americas | All | 30 E2 |

[1314] In addition to providing specific differentiation between antibodies arising from an infection with Zika and the related flaviviruses, it is important to differentiate binding by antibodies to other potentially co-circulating microorganisms. We thus assembled datasets of sequences from several other organisms of interest including Saint Louis encephalitis virus, Japanese encephalitis, hepatitis C, human parvovirus 19, human enteroviruses groups A-J, Ross River virus, Easter equine encephalitis, and malaria. The sequences were curated to ensure complete or near complete sequences and no duplication of isolates. The numbers of curated sequences are shown in the initial rows of Tables 18 and 19. We then interrogated these datasets with the diagnostic set of pentamer peptides to determine if the pentamers are also found in these organisms. A determination was made of presence or absence of the pentamers, but not a determination of whether the peptide of interest in the target protein occurred in a B cell epitope within that protein. In addition, we did not evaluate the timing/life stage of protein transcription for each organism. Hence an overestimate of potential antibody cross reactions was made. Very few cross reactions were found except for a few for dengue with the other flaviviruses. Some potential cross reactivity due to pentamers in common with Plasmodium falciparum was noted. Plasmodium comprises a large, >5300 protein, proteome. The results are shown in Tables 18 and 19 and in FIGS. 24 and 25

[1315] These analyses were subsequently extended to include Usutu virus as shown in Table 33 below

TABLE 16
Specificity of selected envelope peptides between flaviviruses and chikungunya

| Column | BEPI | pos | Flanks | BEPIpent | DEN1 | DEN2 | DEN3 | DEN4 | YF | WNV | ZIKV | CHIK |
|---|---|---|---|---|---|---|---|---|---|---|---|---|
| DEN1 | −1.04 | 51 | ELLKTEVTNPAVLRK SEQ 446 | EVTNP SEQ 519 | 186 | 0 | 0 | 0 | 0 | 0 | 0 | 0 |
| DEN1 | −1.84 | 168 | IATITPQAPTSEIQL SEQ 447 | PQAPT SEQ 520 | 187 | 0 | 0 | 0 | 0 | 0 | 0 | 0 |
| DEN1 | −2.09 | 227 | WTSGASTSQETWNRQ SEQ 448 | STSQE SEQ 521 | 188 | 0 | 0 | 0 | 0 | 0 | 0 | 0 |
| DEN1 | −1.57 | 272 | TGATEIQTSGTTTIF SEQ 449 | IQTSG SEQ 522 | 192 | 0 | 3 | 0 | 0 | 0 | 0 | 0 |
| DEN1 | −1.55 | 329 | VQVKYEGTDAPCKIP SEQ 450 | EGTDA SEQ 523 | 190 | 0 | 0 | 0 | 0 | 0 | 0 | 0 |
| DEN1 | −1.77 | 344 | FLTQDEKGVTQNGRL SEQ 451 | EKGVT SEQ 524 | 185 | 0 | 0 | 0 | 0 | 0 | 0 | 0 |
| DEN1 | −0.99 | 361 | ANPIVTDKEKPVNIE SEQ 452 | TDKEK SEQ 525 | 191 | 0 | 0 | 0 | 0 | 0 | 0 | 0 |
| DEN1 | −1.55 | 371 | PVNIETEPPFGESYI SEQ 453 | TEPPF SEQ 526 | 191 | 0 | 0 | 0 | 0 | 0 | 0 | 0 |
| DEN2 | −1.65 | 226 | WLPGADTQGSNWIQK SEQ 454 | DTQGS SEQ527 | 0 | 215 | 0 | 0 | 0 | 0 | 0 | 0 |
| DEN2 | −1.13 | 228 | PGADTQGSNWIQKET SEQ 455 | QGSNW SEQ 528 | 0 | 215 | 0 | 0 | 0 | 0 | 0 | 0 |
| DEN2 | −1.44 | 244 | VTFKNPHAKKQDVVV SEQ 456 | PHAKK SEQ 529 | 0 | 215 | 0 | 0 | 0 | 0 | 0 | 0 |
| DEN2 | −1.74 | 328 | IRVQYEGDGSPCKIP SEQ 457 | EGDGS SEQ 530 | 0 | 215 | 0 | 0 | 0 | 0 | 0 | 0 |
| DEN2 | −1.27 | 330 | VQYEGDGSPCKIPFE SEQ 458 | DGSPC SEQ 531 | 0 | 215 | 0 | 0 | 0 | 0 | 0 | 0 |
| DEN2 | −1.28 | 362 | PIVTEKDSPVNIEAE SEQ459 | KDSPV SEQ 532 | 0 | 212 | 0 | 0 | 0 | 0 | 0 | 0 |
| DEN2 | −1.53 | 370 | PVNIEAEPPFGDSYI SEQ 460 | AEPPF SEQ 533 | 1 | 215 | 208 | 0 | 0 | 0 | 0 | 0 |
| DEN2 | −1.14 | 372 | NIEAEPPFGDSYIIV SEQ 461 | PPFGD SEQ 534 | 0 | 215 | 0 | 433 | 48 | 0 | 0 | 0 |
| DEN3 | −1.49 | 154 | QHQVGNETQGVTAEI SEQ 462 | NETQG SEQ 535 | 0 | 0 | 206 | 0 | 0 | 0 | 0 | 0 |
| DEN3 | −2.03 | 224 | WTSGATTETPTWNRK SEQ 463 | TTETP SEQ 536 | 0 | 0 | 205 | 0 | 0 | 0 | 0 | 0 |
| DEN3 | −1.63 | 269 | TGATEIQNSGGTSIF SEQ 464 | IQNSG SEQ 537 | 0 | 0 | 203 | 0 | 0 | 0 | 0 | 0 |
| DEN3 | −1.63 | 311 | VLKKEVSETQHGTIL SEQ 465 | VSETQ SEQ 538 | 0 | 0 | 208 | 0 | 0 | 0 | 0 | 0 |
| DEN3 | −1.24 | 327 | KVEYKGEDAPCKIPF SEQ 466 | GEDAP SEQ 539 | 0 | 0 | 145 | 0 | 0 | 0 | 0 | 0 |
| DEN3 | −1.02 | 327 | KVEYKGEDVPCKIPF SEQ 467 | GEDVP SEQ 540 | 0 | 0 | 62 | 0 | 0 | 0 | 0 | 0 |
| DEN3 | −1.31 | 336 | PCKIPFSTEDGQGKA SEQ 468 | FSTED SEQ 541 | 0 | 0 | 208 | 0 | 0 | 0 | 0 | 0 |
| DEN3 | −1.17 | 360 | PVVTKKEEPVNIEAE SEQ 469 | KEEPV SEQ 542 | 0 | 0 | 191 | 0 | 0 | 0 | 0 | 0 |
| DEN3 | −1.57 | 369 | VNIEAEPPFGESNIV SEQ 470 | EPPFG SEQ 543 | 192 | 215 | 208 | 433 | 0 | 0 | 0 | 0 |
| DEN4 | −1.18 | 48 | DFELTKTTAKEVALL SEQ 471 | KTTAK SEQ 544 | 0 | 0 | 0 | 431 | 0 | 0 | 0 | 0 |
| DEN4 | −1.68 | 155 | HAVGNDTSNHGVTAT SEQ 472 | DTSNH SEQ 545 | 0 | 0 | 0 | 430 | 0 | 0 | 0 | 0 |
| DEN4 | −1.59 | 166 | VTATITPRSPSVEVE SEQ 473 | TPRSP SEQ 546 | 0 | 0 | 0 | 433 | 0 | 0 | 0 | 0 |
| DEN4 | −1.62 | 272 | GATEVDSGDGNHMFA SEQ 474 | DSGDG SEQ 547 | 0 | 0 | 0 | 424 | 0 | 0 | 0 | 0 |
| DEN4 | −1.29 | 315 | DKEMAETQHGTTVVK SEQ 475 | ETQHG SEQ 548 | 192 | 215 | 208 | 433 | 0 | 0 | 0 | 0 |
| DEN4 | −1.44 | 328 | VKVKYEGAGAPCKVP SEQ 476 | EGAGA SEQ 549 | 0 | 0 | 0 | 431 | 0 | 0 | 0 | 0 |
| DEN4 | −1.06 | 358 | ISSIPLAENTNSVTN SEQ 477 | LAENT SEQ 550 | 0 | 0 | 0 | 431 | 0 | 0 | 0 | 0 |
| DEN4 | −1.05 | 362 | PLAENTNSVTNIELE SEQ 478 | TNSVT SEQ 551 | 0 | 0 | 0 | 423 | 0 | 0 | 0 | 0 |
| PAN | | 313 | | ETQHG SEQ 552 | 192 | 215 | 208 | 433 | 0 | 0 | 0 | 0 |
| DEN | | | | | | | | | | | | |
| PAN | | 369 | | EPPFG SEQ 553 | 192 | 215 | 208 | 433 | 0 | 51 | 0 | 0 |
| DEN | | | | | | | | | | | | |
| PAN | | 99 | | DRGWG SEQ 554 | 192 | 215 | 208 | 433 | 48 | 50 | 41 | 0 |
| DEN | | | | | | | | | | | | |
| PAN | | 185 | | SPRTG SEQ 555 | 192 | 215 | 207 | 0 | 0 | 0 | 0 | 0 |
| DEN | | | | | | | | | | | | |
| PAN | | 404 | | TARGA SEQ 556 | 192 | 0 | 207 | 0 | 0 | 0 | 0 | 0 |
| DEN | | | | | | | | | | | | |
| PAN | | 394 | | GSSIG SEQ 557 | 192 | 214 | 208 | 433 | 48 | 51 | 0 | 0 |
| DEN | | | | | | | | | | | | |
| PAN | | 74 | | RCPTQ SEQ 558 | 192 | 215 | 208 | 433 | 0 | 0 | 41 | 0 |
| DEN | | | | | | | | | | | | |
| PAN | | 370 | | PPFGD SEQ 559 | 0 | 215 | 0 | 433 | 48 | 51 | 41 | 0 |
| DEN | | | | | | | | | | | | |
| YF | −1.04 | 52 | ETVAIDRPAEVRKVC SEQ 479 | DRPAE SEQ 560 | 0 | 0 | 0 | 0 | 4 | 0 | 0 | 0 |
| YF | −1.25 | 150 | HVGAKQENWNTDIKT SEQ 480 | QENWN SEQ 561 | 0 | 0 | 0 | 0 | 39 | 0 | 0 | 0 |
| YF | −1.22 | 165 | LKFDALSGSQEVEFI SEQ 481 | LSGSQ SEQ 562 | 0 | 0 | 0 | 0 | 48 | 0 | 0 | 0 |
| YF | −1.08 | 218 | DLTLPWQSGSGGVWR SEQ 482 | WQSGS SEQ 563 | 0 | 0 | 0 | 0 | 48 | 0 | 0 | 0 |
| YF | −1.50 | 250 | VLALGNQEGSLKTAL SEQ 483 | NQEGS SEQ 564 | 0 | 0 | 0 | 0 | 44 | 0 | 0 | 0 |
| YF | −1.73 | 267 | AMRVTKDTNDNNLYK SEQ 484 | KDTND SEQ 565 | 0 | 0 | 0 | 0 | 25 | 0 | 0 | 0 |
| YF | −2.21 | 311 | FFVKNPTDTGHGTVV SEQ 485 | PTDTG SEQ 566 | 0 | 0 | 0 | 0 | 47 | 0 | 0 | 0 |
| YF | −1.30 | 358 | VNPIASTNDDEVLIE SEQ 486 | STNDD SEQ 567 | 0 | 0 | 0 | 0 | 46 | 0 | 0 | 0 |
| YF | −1.61 | 356 | VTVNPIASTNDDEVL SEQ 487 | IASTN SEQ 568 | 0 | 0 | 0 | 0 | 48 | 0 | 0 | 0 |
| YF | −1.03 | 369 | VLIEVNPPFGDSYII SEQ 488 | NPPFG SEQ 569 | 0 | 0 | 0 | 0 | 48 | 0 | 0 | 0 |
| WNV | −1.52 | 38 | TIMSKDKPTIDVKMM SEQ 489 | DKPTI SEQ 1247 | 0 | 0 | 0 | 0 | 0 | 49 | 0 | 0 |
| WNV | −1.11 | 148 | FVHGPTTVESHGKIG SEQ 490 | TTVES SEQ 1248 | 0 | 0 | 0 | 0 | 0 | 51 | 0 | 0 |
| WNV | −1.21 | 188 | VTVDCEPRSGIDTSA SEQ 491 | EPRSG SEQ 1249 | 0 | 0 | 0 | 433 | 0 | 51 | 0 | 0 |
| WNV | −1.07 | 253 | SVVALGSQEGALHQA SEQ 492 | GSQEG SEQ 1250 | 192 | 215 | 208 | 432 | 0 | 51 | 40 | 0 |
| WNV | −0.81 | 295 | EKLQLKGTTYGVCSK SEQ 493 | KGTTY SEQ 1251 | 0 | 0 | 0 | 0 | 0 | 51 | 0 | 0 |
| WNV | −1.86 | 312 | KFARTPADTGHGTVV SEQ 494 | PADTG SEQ 1252 | 0 | 0 | 0 | 0 | 0 | 51 | 0 | 0 |
| WNV | −1.50 | 327 | LELQYTGTDGPCKVP SEQ 495 | TGTDG SEQ 1253 | 0 | 0 | 0 | 0 | 0 | 49 | 0 | 0 |
| WNV | −0.90 | 385 | YIVVGRGEQQINHHW SEQ 496 | RGEQQ SEQ 1254 | 0 | 0 | 0 | 0 | 0 | 51 | 0 | 0 |
| ZIKV | −0.62 | 16 | DFVEGMSGGTWVDIV SEQ 497 | MSGGT SEQ 1255 | 0 | 0 | 0 | 0 | 0 | 0 | 41 | 0 |
| ZIKV | −1.21 | 38 | TVMAQDKPTVDIELV SEQ 498 | DKPTV SEQ 1256 | 0 | 0 | 0 | 0 | 0 | 0 | 41 | 0 |
| ZIKV | −1.41 | 86 | AYLDKQSDTQYVCKR SEQ 499 | QSDTQ SEQ 570 | 0 | 0 | 0 | 0 | 0 | 0 | 41 | 0 |
| ZIKV | −1.37 | 1.28 | SKKMTGKSIQPENLE SEQ 500 | GKSIQ SEQ 571 | 0 | 0 | 0 | 0 | 0 | 0 | 41 | 0 |
| ZIKV | −0.84 | 145 | IMLSVHGSQHSGMIV SEQ 501 | HGSQH SEQ 572 | 0 | 0 | 0 | 0 | 0 | 0 | 41 | 0 |
| ZIKV | −2.20 | 159 | VNDTGHETDENRAKV SEQ 502 | HETDE SEQ 573 | 0 | 0 | 0 | 0 | 0 | 0 | 41 | 0 |
| ZIKV | −2.01 | 172 | KVEITPNSPRAEATL SEQ 503 | PNSPR SEQ 574 | 0 | 0 | 0 | 0 | 0 | 0 | 41 | 0 |
| ZIKV | −1.70 | 175 | ITPNSPRAEATLGGF SEQ 504 | PRAEA SEQ 575 | 0 | 0 | 0 | 0 | 0 | 0 | 41 | 0 |
| ZIKV | −1.55 | 233 | AGADTGTPHWNNKEA SEQ 505 | GTPHW SEQ 576 | 0 | 0 | 0 | 0 | 0 | 0 | 41 | 0 |
| ZIKV | −1.47 | 282 | EMDGAKGRLSSGHLK SEQ 506 | KGRLS SEQ 577 | 0 | 0 | 0 | 0 | 0 | 0 | 41 | 0 |
| ZIKV | −1.56 | 335 | EVQYAGTDGPCKVPA SEQ 507 | GTDGP SEQ 578 | 0 | 0 | 0 | 0 | 0 | 50 | 40 | 0 |
| ZIKV | −1.14 | 365 | ITANPVITESTENSK SEQ 508 | VITES SEQ 579 | 0 | 0 | 0 | 0 | 0 | 0 | 41 | 0 |
| ZIKV | −1.51 | 368 | NPVITESTENSKMML SEQ 509 | ESTEN SEQ 580 | 0 | 0 | 0 | 0 | 0 | 0 | 41 | 0 |
| ZIKV | −1.05 | 370 | VTTESTENSKMMLEL SEQ 510 | TENSK SEQ 581 | 0 | 0 | 0 | 0 | 0 | 0 | 41 | 0 |
| CHIK | −1.14 | 40 | ALERIRNEATDGTLK SEQ 511 | RNEAT SEQ 582 | 0 | 0 | 0 | 0 | 0 | 0 | 0 | 30 |
| CHIK | −1.21 | 144 | GREKFHSRPQHGKEL SEQ 512 | HSRPQ SEQ 583 | 0 | 0 | 0 | 0 | 0 | 0 | 0 | 30 |
| CHIK | −1.18 | 249 | VPRNAELGDRKGKIH SEQ 513 | EFGDR SEQ 584 | 0 | 0 | 0 | 0 | 0 | 0 | 0 | 30 |
| CHIK | −1.46 | 274 | RVPKARNPTVTYGKN SEQ 514 | RNPTV SEQ 585 | 0 | 0 | 0 | 0 | 0 | 0 | 0 | 30 |
| CHIK | −1.14 | 276 | PKARNPTVTYGKNQV SEQ 515 | PTVTY SEQ 586 | 0 | 0 | 0 | 0 | 0 | 0 | 0 | 30 |
| CHIK | −1.27 | 303 | SYRNMGEEPNYQEEW SEQ 516 | GEEPN SEQ 587 | 0 | 0 | 0 | 0 | 0 | 0 | 0 | 30 |
| CHIK | −0.70 | 334 | EVTWGNNEPYKYWPQ SEQ 517 | NNEPY SEQ 588 | 0 | 0 | 0 | 0 | 0 | 0 | 0 | 30 |
| CHIK | −1.33 | 347 | PQLSTNGTAHGHPHE SEQ 518 | NGTAH SEQ 589 | 0 | 0 | 0 | 0 | 0 | 0 | 0 | 30 |

TABLE 17
Specificity of selected NS1 peptides between flaviviruses and chikungunya

| Column | Pep # | BEPI | pos | Flanks | BepiPent | DEN1 | DEN2 | DEN3 | DEN4 | WNV | YF | ZIKV |
|---|---|---|---|---|---|---|---|---|---|---|---|---|
| DEN1 | 1 | −1.45 | 38 | YKFQADSPKRLSAAI SEQ 590 | DSPKR SEQ 647 | 74 | 0 | 160 | 0 | 0 | 0 | 0 |
| DEN1 | 2 | −0.75 | 104 | AQGKKMIRPQPMEHK SEQ 591 | MIRPQ SEQ 648 | 70 | 0 | 0 | 0 | 0 | 0 | 0 |
| DEN1 | 3 | −1.84 | 141 | IDGPDTPECPDGQRA SEQ 592 | TPECP SEQ 649 | 73 | 0 | 160 | 0 | 0 | 0 | 0 |
| DEN1 | 4 | −1.27 | 144 | PDTPECPDGQRAWNI SEQ 593 | CPDGQ SEQ 650 | 43 | 0 | 0 | 0 | 0 | 0 | 0 |
| DEN1 | 5 | −0.94 | 190 | MSAAIKDSKAVHADM SEQ 594 | KDSKA SEQ 651 | 74 | 0 | 0 | 0 | 0 | 0 | 0 |
| DEN1 | 6 | −1.17 | 206 | YWIESEKNETWKLAR SEQ 595 | EKNET SEQ 652 | 74 | 0 | 0 | 0 | 0 | 0 | 0 |
| DEN1 | 7 | −1.46 | 294 | DEHCGNRGPSLRTTT SEQ 596 | NRGPS SEQ 653 | 47 | 108 | 0 | 0 | 0 | 0 | 0 |
| DEN1 | 8 | −0.81 | 301 | GPSLRTTTVTGKIIH SEQ 597 | TTTVT SEQ 654 | 74 | 0 | 0 | 0 | 0 | 0 | 0 |
| DEN2 | 1 | −1.50 | 39 | KFQPESPSKLASAIQ SEQ 598 | SPSKL SEQ 655 | 0 | 107 | 0 | 0 | 0 | 0 | 0 |
| DEN2 | 2 | −2.00 | 105 | AGKRSLRPQPTELKY SEQ 599 | LRPQP SEQ 656 | 0 | 105 | 0 | 0 | 0 | 0 | 0 |
| DEN2 | 3 | −1.15 | 126 | KAKMLSTESHNQTFL SEQ 600 | STESH SEQ 657 | 0 | 97 | 0 | 0 | 0 | 0 | 0 |
| DEN2 | 4 | −1.43 | 142 | DGPETAECPNTNRAW SEQ 601 | AECPN SEQ 658 | 0 | 106 | 0 | 0 | 0 | 0 | 0 |
| DEN2 | 5 | −0.83 | 191 | SAAIKDNRAVHADMG SEQ 602 | DNRAV SEQ 659 | 0 | 106 | 0 | 0 | 0 | 0 | 0 |
| DEN2 | 6 | −1.03 | 248 | IIPKNFAGPVSQHNY SEQ 603 | FAGPV SEQ 660 | 0 | 105 | 0 | 0 | 0 | 0 | 0 |
| DEN2 | 7 | −1.02 | 262 | YRPGYHTQTAGPWHL SEQ 604 | HTQTA SEQ 661 | 0 | 105 | 159 | 0 | 0 | 0 | 0 |
| DEN2 | 8 | −1.37 | 291 | VVVTEDCGNRGPSLR SEQ 605 | DCGNR SEQ 662 | 0 | 106 | 0 | 0 | 0 | 0 | 0 |
| DEN3 | 1 | −1.40 | 37 | QYKFQADSPKRLATA SEQ 606 | ADSPK SEQ 663 | 74 | 0 | 160 | 0 | 0 | 0 | 0 |
| DEN3 | 2 | −1.33 | 103 | LKQGKRTLTPQPMEL SEQ 607 | RTLTP SEQ 664 | 0 | 0 | 158 | 0 | 0 | 0 | 0 |
| DEN3 | 3 | −1.80 | 140 | IIDGPNTPECPSASR SEQ 608 | NTPEC SEQ 665 | 1 | 0 | 157 | 0 | 0 | 0 | 0 |
| DEN3 | 4 | −0.90 | 190 | MSAAVKDERAVHADM SEQ 609 | KDERA SEQ 666 | 0 | 0 | 159 | 0 | 0 | 0 | 0 |
| DEN3 | 5 | −1.32 | 207 | WIESQKNGSWKLEKA SEQ 610 | KNGSW SEQ 667 | 0 | 0 | 160 | 0 | 0 | 0 | 0 |
| DEN3 | 6 | −1.11 | 257 | ISQHNHRPGYHTQTA SEQ 611 | HRPGY SEQ 668 | 0 | 0 | 141 | 0 | 0 | 0 | 0 |
| DEN3 | 7 | −0.86 | 290 | TVVITENCGTRGPSL SEQ 612 | ENCGT SEQ 669 | 0 | 0 | 160 | 0 | 0 | 0 | 0 |
| DEN3 | 8 | −0.86 | 301 | GPSLRTTTVSGKLIH SEQ 613 | TTTVS SEQ 670 | 0 | 0 | 160 | 0 | 0 | 0 | 0 |
| DEN4 | 1 | −1.18 | 39 | KFQPESPARLASAIL SEQ 614 | SPARL SEQ 671 | 0 | 0 | 0 | 29 | 0 | 0 | 0 |
| DEN4 | 2 | −1.63 | 104 | TKGKRALTPPVSDLK SEQ 615 | ALTPP SEQ 672 | 0 | 0 | 0 | 26 | 0 | 0 | 0 |
| DEN4 | 3 | −1.07 | 125 | GKAKIFTPEARNSTF SEQ 616 | FTPEA SEQ 673 | 0 | 0 | 0 | 28 | 0 | 0 | 0 |
| DEN4 | 4 | −1.81 | 140 | LIDGPDTSECPNERR SEQ 617 | DTSEC SEQ 674 | 0 | 0 | 0 | 29 | 0 | 0 | 0 |
| DEN4 | 5 | −1.25 | 207 | WIESSKNQTWQIEKA SEQ 618 | KNQTW SEQ 675 | 0 | 0 | 0 | 29 | 0 | 0 | 0 |
| DEN4 | 6 | −1.20 | 248 | LIPKSYAGPFSQHNY SEQ 619 | YAGPF SEQ 676 | 0 | 0 | 0 | 28 | 0 | 0 | 0 |
| DEN4 | 7 | −1.01 | 260 | HNYRQGYATQTVGPW SEQ 620 | GYATQ SEQ 677 | 0 | 0 | 0 | 29 | 0 | 0 | 0 |
| DEN4 | 8 | −1.19 | 292 | TIQEDCDHRGPSLRT SEQ 621 | CDHRG SEQ 678 | 0 | 0 | 0 | 29 | 0 | 0 | 0 |
| WNV | 1 | −1.69 | 38 | RYKYYPETPQGLAKI SEQ 622 | PETPQ SEQ 679 | 0 | 0 | 0 | 0 | 52 | 0 | 0 |
| WNV | 2 | −1.16 | 102 | GMYKSAPKRLTATTE SEQ 623 | APKRL SEQ 680 | 0 | 0 | 0 | 0 | 51 | 0 | 0 |
| WNV | 3 | −1.43 | 144 | GPETKECPTQNRAWN SEQ 624 | ECPTQ SEQ 681 | 0 | 0 | 0 | 0 | 51 | 0 | 0 |
| WNV | 4 | −1.74 | 177 | KVRESNTTECDSKII SEQ 625 | NTTEC SEQ 682 | 0 | 0 | 0 | 0 | 52 | 0 | 0 |
| WNV | 5 | −1.47 | 261 | HNRRPGYKTQNQGPW SEQ 626 | GYKTQ SEQ 683 | 0 | 0 | 0 | 0 | 52 | 0 | 0 |
| WNV | 6 | −1.90 | 266 | GYKTQNQGPWDEGRV SEQ 627 | NQGPW SEQ 684 | 0 | 0 | 0 | 0 | 52 | 0 | 0 |
| WNV | 7 | −1.67 | 297 | SCGHRGPATRTTTES SEQ 628 | GPATR SEQ 685 | 0 | 0 | 0 | 0 | 52 | 0 | 0 |
| WNV | 8 | −1.54 | 303 | PATRTTTESGKLITD SEQ 629 | TTESG SEQ 686 | 0 | 0 | 0 | 0 | 51 | 0 | 0 |
| YF | 1 | −1.21 | 35 | LNKYSYYPEDPVKLA SEQ 630 | YYPED SEQ 687 | 0 | 0 | 0 | 0 | 0 | 72 | 0 |
| YF | 2 | −1.41 | 140 | IIDGKSRKECPFSNR SEQ 631 | SRKEC SEQ 688 | 0 | 0 | 0 | 0 | 0 | 72 | 0 |
| YF | 3 | −2.21 | 193 | AVNGKKSAHGSPTFW SEQ 632 | KSAHG SEQ 689 | 0 | 0 | 0 | 0 | 0 | 72 | 0 |
| YF | 4 | −1.12 | 234 | LTHTIGTSVEESEMF SEQ 633 | GTSVE SEQ 690 | 0 | 0 | 0 | 0 | 0 | 72 | 0 |
| YF | 5 | −1.05 | 264 | PGYKVQTNGPWMQVP SEQ 634 | QTNGP SEQ 691 | 0 | 0 | 0 | 0 | 0 | 72 | 0 |
| YF | 6 | −2.05 | 295 | GNCDGRGKSTRSTTD SEQ 635 | RGKST SEQ 692 | 0 | 0 | 0 | 0 | 0 | 71 | 0 |
| YF | 7 | −2.15 | 301 | GKSTRSTTDSGKVIP SEQ 636 | STTDS SEQ 693 | 0 | 0 | 0 | 0 | 0 | 72 | 0 |
| YF | 8 | −1.15 | 338 | PMEIRPRKTHESHLV SEQ 637 | PRKTH SEQ 694 | 0 | 0 | 0 | 0 | 0 | 50 | 0 |
| ZIKV | 1 | −1.55 | 14 | VDFSKKETRCGTGVF SEQ 638 | KETRC SEQ 695 | 0 | 0 | 0 | 0 | 0 | 0 | 47 |
| ZIKV | 2 | −1.62 | 38 | DRYKYHPDSPRRLAA SEQ 639 | HPDSP SEQ 696 | 0 | 0 | 0 | 0 | 0 | 0 | 47 |
| ZIKV | 3 | −1.06 | 130 | HFVRAAKTNNSFVVD SEQ 640 | AKTNN SEQ 697 | 0 | 0 | 0 | 0 | 0 | 0 | 47 |
| ZIKV | 4 | −1.23 | 193 | GTAVKGKEAVHSDLG SEQ 641 | GKEAV SEQ 698 | 0 | 0 | 0 | 0 | 0 | 0 | 44 |
| ZIKV | 5 | −1.23 | 209 | WIESEKNDTWRLKRA SEQ 642 | KNDTW SEQ 699 | 0 | 0 | 0 | 0 | 0 | 0 | 47 |
| ZIKV | 6 | −1.36 | 259 | LSHHNTREGYRTQMK SEQ 643 | TREGY SEQ 700 | 0 | 0 | 0 | 0 | 0 | 0 | 45 |
| ZIKV | 7 | −0.86 | 291 | TKVHVEETCGTRGPS SEQ 644 | EETCG SEQ 701 | 0 | 0 | 0 | 0 | 0 | 0 | 47 |
| ZIKV | 8 | −1.56 | 303 | GPSLRSTTASGRVIE SEQ 645 | STTAS SEQ 702 | 0 | 0 | 0 | 0 | 0 | 0 | 46 |
| ZIKV | 9 | −1.85 | 341 | MEIRPRKEPESNLVR SEQ 646 | RKEPE SEQ 703 | 0 | 0 | 0 | 0 | 0 | 0 | 46 |

TABLE 18
Specificity of selected envelope peptides between flaviviruses and other microorganisms

| | | | | | | | | | | | | Plasmodium |
|---|---|---|---|---|---|---|---|---|---|---|---|---|
| Column | BEPI | pos | Flanks | BEPIpent | SLE | HepC | JAEV | Parvo19 | Entero | RossRiver | EEE | falciparum |
| Isolates | | | | | 3 | 539 | 11 | | 90 | 12 | 4 | 1 |
| proteins | | | | | 24 | 539 | 11 | 225 | 990 | 109 | 44 | 5392 |
| DEN1 | −1.04 | 51 | ELLKTEVTNPAVLRK | EVTNP | 0 | 0 | 0 | 0 | 0 | 0 | 0 | 0 |
| DEN1 | −1.84 | 168 | IATITPQAPTSEIQL | PQAPT | 0 | 0 | 0 | 0 | 0 | 0 | 0 | 0 |
| DEN1 | −2.09 | 227 | WTSGASTSQETWNRQ | STSQE | 0 | 0 | 0 | 0 | 0 | 0 | 0 | 1 |
| DEN1 | −1.57 | 272 | TGATEIQTSGTTTIF | IQTSG | 0 | 0 | 0 | 0 | 0 | 0 | 0 | 0 |
| DEN1 | −1.55 | 329 | VQVKYEGTDAPCKIP | EGTDA | 0 | 0 | 0 | 0 | 0 | 0 | 0 | 0 |
| DEN1 | −1.77 | 344 | FLTQDEKGVTQNGRL | EKGVT | 0 | 0 | 0 | 0 | 0 | 0 | 0 | 5 |
| DEN1 | −0.99 | 361 | ANPIVTDKEKPVNIE | TDKEK | 0 | 0 | 0 | 0 | 0 | 0 | 0 | 10 |
| DEN1 | −1.55 | 371 | PVNIETEPPFGESYI | TEPPF | 0 | 0 | 0 | 0 | 0 | 0 | 0 | 0 |
| DEN2 | −1.65 | 226 | WLPGADTQGSNWIQK | DTQGS | 0 | 0 | 0 | 0 | 0 | 0 | 0 | 0 |
| DEN2 | −1.13 | 228 | PGADTQGSNWIQKET | QGSNW | 0 | 0 | 0 | 0 | 0 | 0 | 0 | 0 |
| DEN2 | −1.44 | 244 | VTFKNPHAKKQDVVV | PHAKK | 0 | 0 | 0 | 0 | 0 | 0 | 0 | 1 |
| DEN2 | −1.74 | 328 | IRVQYEGDGSPCKIP | EGDGS | 0 | 0 | 0 | 0 | 0 | 0 | 0 | 4 |
| DEN2 | −1.27 | 330 | VQYEGDGSPCKIPFE | DGSPC | 0 | 0 | 0 | 0 | 0 | 0 | 0 | 1 |
| DEN2 | −1.28 | 362 | PIVTEKDSPVNIEAE | KDSPV | 0 | 0 | 0 | 0 | 0 | 0 | 0 | 0 |
| DEN2 | −1.53 | 370 | PVNIEAEPPFGDSYI | AEPPF | 0 | 0 | 0 | 0 | 0 | 0 | 0 | 0 |
| DEN2 | −1.14 | 372 | NIEAEPPFGDSYIIN | PPFGD | 0 | 3 | 11 | 0 | 0 | 0 | 0 | 0 |
| DEN3 | −1.49 | 154 | QHQVGNETQGVTAEI | NETQG | 0 | 0 | 0 | 0 | 0 | 0 | 0 | 0 |
| DEN3 | −2.03 | 224 | WTSGATTETPTWNRK | TTETP | 0 | 0 | 0 | 0 | 0 | 0 | 0 | 2 |
| DEN3 | −1.63 | 269 | TGATEIQNSGGTSIF | IQNSG | 0 | 0 | 0 | 0 | 0 | 0 | 0 | 3 |
| DEN3 | −1.63 | 311 | VLKKEVSETQHGTIL | VSETQ | 0 | 0 | 0 | 0 | 0 | 0 | 0 | 4 |
| DEN3 | −1.24 | 327 | KVEYKGEDAPCKIPF | GEDAP | 0 | 0 | 0 | 0 | 0 | 0 | 0 | 0 |
| DEN3 | −1.02 | 327 | KVEYKGEDVPCKIPF | GEDVP | 0 | 0 | 0 | 0 | 0 | 0 | 0 | 0 |
| DEN3 | −1.31 | 336 | PCKIPFSTEDGQGKA | FSTED | 0 | 0 | 0 | 0 | 0 | 0 | 0 | 1 |
| DEN3 | −1.17 | 360 | PVVTKKEEPVNIEAE | KEEPV | 0 | 0 | 0 | 0 | 0 | 0 | 0 | 3 |
| DEN3 | −1.57 | 369 | VNIEAEPPFGESNIV | EPPFG | 24 | 3 | 11 | 0 | 0 | 0 | 0 | 0 |
| DEN4 | −1.18 | 48 | DFELTKTTAKEVALE | KTTAK | 0 | 0 | 0 | 0 | 0 | 0 | 0 | 1 |
| DEN4 | −1.68 | 155 | HAVGNDTSNHGVTAT | DTSNH | 0 | 0 | 0 | 0 | 0 | 0 | 0 | 2 |
| DEN4 | −1.59 | 166 | VTATTTPRSPSVEVE | TPRSP | 0 | 0 | 0 | 0 | 0 | 0 | 0 | 0 |
| DEN4 | −1.62 | 272 | GATEVDSGDGNHMFA | DSGDG | 0 | 0 | 0 | 0 | 0 | 0 | 0 | 3 |
| DEN4 | −1.29 | 315 | DKEMAETQHGTTVVK | ETQHG | 0 | 0 | 0 | 0 | 0 | 0 | 0 | 0 |
| DEN4 | −1.44 | 328 | VKVKYEGAGAPCKVP | EGAGA | 0 | 0 | 0 | 0 | 0 | 0 | 0 | 1 |
| DEN4 | −1.06 | 358 | ISSIPLAENTNSVTN | LAENT | 0 | 0 | 0 | 0 | 0 | 0 | 0 | 2 |
| DEN4 | −1.05 | 362 | PLAENTNSVTNIELE | TNSVT | 0 | 0 | 0 | 4 | 0 | 0 | 0 | 2 |
| PAN | | 313 | | ETQHG | 0 | 0 | 0 | 0 | 0 | 0 | 0 | 0 |
| DEN | | | | | | | | | | | | |
| PAN | | 369 | | EPPFG | 24 | 3 | 11 | 0 | 0 | 0 | 0 | 0 |
| DEN | | | | | | | | | | | | |
| PAN | | 99 | | DRGWG | 24 | 3 | 11 | 0 | 0 | 0 | 0 | 0 |
| DEN | | | | | | | | | | | | |
| PAN | | 185 | | SPRTG | 0 | 0 | 0 | 0 | 0 | 0 | 0 | 0 |
| DEN | | | | | | | | | | | | |
| PAN | | 404 | | TARGA | 0 | 1 | 0 | 0 | 0 | 0 | 0 | 0 |
| DEN | | | | | | | | | | | | |
| PAN | | 394 | | GSSIG | 24 | 3 | 0 | 0 | 0 | 0 | 0 | 1 |
| DEN | | | | | | | | | | | | |
| PAN | | 74 | | RCPTQ | 0 | 0 | 0 | 0 | 0 | 0 | 0 | 0 |
| DEN | | | | | | | | | | | | |
| PAN | | 370 | | PPFGD | 24 | 3 | 11 | 0 | 0 | 0 | 0 | 0 |
| DEN | | | | | | | | | | | | |
| YF | −1.04 | 52 | ETVAIDRPAEVRKVC | DRPAE | 0 | 0 | 0 | 0 | 0 | 0 | 0 | 0 |
| YF | −1.25 | 150 | HVGAKQENWNTDIKT | QENWN | 0 | 0 | 0 | 0 | 0 | 0 | 0 | 0 |
| YF | −1.22 | 165 | LKFDALSGSQEVEFI | LSGSQ | 0 | 0 | 0 | 0 | 0 | 0 | 0 | 2 |
| YF | −1.08 | 218 | DLTLPWQSGSGGVWR | WQSGS | 0 | 0 | 0 | 0 | 68 | 0 | 0 | 0 |
| YF | −1.50 | 250 | VLALGNQEGSLKTAL | NQEGS | 0 | 0 | 0 | 0 | 0 | 0 | 0 | 1 |
| YF | −1.73 | 267 | AMRVTKDTNDNNLYK | KDTND | 0 | 0 | 0 | 0 | 0 | 0 | 0 | 11 |
| YF | −2.21 | 311 | FFVKNPTDTGHGTVV | PTDTG | 12 | 1 | 0 | 0 | 0 | 0 | 0 | 0 |
| YF | −1.30 | 358 | VNPIASTNDDEVLIE | STNDD | 0 | 0 | 0 | 0 | 0 | 0 | 0 | 6 |
| YF | −1.61 | 356 | VTVNPIASTNDDEVL | IASTN | 0 | 0 | 2 | 0 | 12 | 0 | 0 | 3 |
| YF | −1.03 | 369 | VLIEVNPPFGDSYII | NPPFG | 0 | 0 | 0 | 0 | 0 | 0 | 0 | 0 |
| WNV | −1.52 | 38 | TIMSKDKPTIDVKMM | DKPTI | 0 | 0 | 0 | 0 | 0 | 0 | 0 | 0 |
| WNV | −1.11 | 148 | FVHGPTTVESHGKIG | TTVES | 0 | 0 | 0 | 0 | 0 | 0 | 0 | 0 |
| WNV | −1.21 | 188 | VTVDCEPRSGIDTSA | EPRSG | 0 | 0 | 11 | 0 | 0 | 0 | 0 | 0 |
| WNV | −1.07 | 253 | SVVALGSQEGALHQA | GSQEG | 24 | 3 | 0 | 0 | 0 | 0 | 0 | 0 |
| WNV | −0.81 | 295 | EKLQLKGTTYGVCSK | KGTTY | 24 | 3 | 11 | 0 | 0 | 0 | 0 | 0 |
| WNV | −1.86 | 312 | KFARTPADTGHGTVV | PADTG | 12 | 2 | 11 | 0 | 0 | 0 | 0 | 0 |
| WNV | −1.50 | 327 | LELQYTGTDGPCKVP | TGTDG | 0 | 0 | 2 | 0 | 0 | 0 | 0 | 0 |
| WNV | −0.90 | 385 | YIVVGRGEQQINHHW | RGEQQ | 0 | 0 | 0 | 0 | 0 | 0 | 0 | 0 |
| ZIKV | −0.62 | 16 | DFVEGMSGGTWVDIV | MSGGT | 0 | 0 | 0 | 0 | 0 | 0 | 0 | 1 |
| ZIKV | −1.21 | 38 | TVMAQDKPTVDIELV | DKPTV | 0 | 0 | 0 | 0 | 0 | 0 | 0 | 0 |
| ZIKV | −1.41 | 86 | AYLDKQSDTQYVCKR | QSDTQ | 0 | 0 | 0 | 0 | 0 | 0 | 0 | 0 |
| ZIKV | −1.37 | 128 | SKKMTGKSIQPENLE | GKSIQ | 0 | 0 | 0 | 0 | 0 | 0 | 0 | 5 |
| ZIKV | −0.84 | 145 | IMLSVHGSQHSGMIV | HGSQH | 0 | 0 | 0 | 0 | 0 | 0 | 0 | 0 |
| ZIKV | −2.20 | 159 | VNDTGHETDENRAKV | HETDE | 0 | 0 | 0 | 0 | 0 | 0 | 0 | 3 |
| ZIKV | −2.01 | 172 | KVEITPNSPRAEATL | PNSPR | 0 | 0 | 0 | 0 | 0 | 0 | 0 | 0 |
| ZIKV | −1.70 | 175 | ITPNSPRAEATLGGF | PRAEA | 0 | 0 | 0 | 0 | 0 | 0 | 0 | 0 |
| ZIKV | −1.55 | 233 | AGADTGTPHWNNKEA | GTPHW | 0 | 0 | 0 | 0 | 0 | 0 | 0 | 0 |
| ZIKV | −1.47 | 282 | EMDGAKGRLSSGHLK | KGRLS | 0 | 0 | 0 | 0 | 0 | 0 | 0 | 5 |
| ZIKV | −1.56 | 335 | EVQYAGTDGPCKVPA | GTDGP | 0 | 0 | 2 | 0 | 0 | 0 | 0 | 0 |
| ZIKV | −1.14 | 365 | ITANPVITESTENSK | VITES | 0 | 0 | 0 | 0 | 0 | 0 | 0 | 3 |
| ZIKV | −1.51 | 368 | NPVITESTENSKMML | ESTEN | 0 | 0 | 0 | 0 | 0 | 0 | 0 | 4 |
| ZIKV | −1.05 | 370 | VITESTENSKMMLEL | TENSK | 0 | 0 | 0 | 0 | 0 | 0 | 0 | 4 |
| | | | | | | | | | | | | 0 |
| CHIK | −1.14 | 40 | ALERIRNEATDGTLK | RNEAT | 0 | 0 | 0 | 0 | 0 | 0 | 0 | 1 |
| CHIK | −1.21 | 144 | GREKFHSRPQHGKEL | HSRPQ | 0 | 0 | 0 | 0 | 0 | 0 | 0 | 0 |
| CHIK | −1.18 | 249 | VPRNAELGDRKGKIH | EFGDR | 0 | 0 | 0 | 0 | 0 | 0 | 0 | 0 |
| CHIK | −1.46 | 274 | RVPKARNPTVTYGKN | RNPTV | 0 | 0 | 0 | 0 | 0 | 0 | 0 | 0 |
| CHIK | −1.14 | 276 | PKARNPTVTYGKNQV | PTVTY | 0 | 1 | 0 | 0 | 0 | 0 | 0 | 0 |
| CHIK | −1.27 | 303 | SYRNMGEEPNYQEEW | GEEPN | 0 | 0 | 0 | 0 | 0 | 0 | 0 | 0 |
| CHIK | −0.70 | 334 | EVTWGNNEPYKYWPQ | NNEPY | 0 | 0 | 0 | 0 | 0 | 0 | 0 | 3 |
| CHIK | −1.33 | 347 | PQLSTNGTAHGHPHE | NGTAH | 0 | 0 | 0 | 0 | 0 | 0 | 0 | 1 |

TABLE 19
Specificity of selected NS1 peptides between flaviviruses and other microorganisms

| | | | | | | | | | | | | Plasmodium |
|---|---|---|---|---|---|---|---|---|---|---|---|---|
| Column | BEPI | pos | BepiPent | Flanks | SLE | HepC | JAEV | Parvo19 | Entero | RossRiver | EEE | falciparum |
| Isolates | | | | | 3 | 539 | 11 | | 90 | 12 | 4 | 1 |
| proteins | | | | | 24 | 539 | 11 | 225 | 990 | 109 | 44 | 5392 |
| DEN1 | −1.45 | 38 | DSPKR | YKFQADSPKRLSAAI | 0 | 0 | 0 | 0 | 0 | 0 | 0 | 0 |
| DEN1 | −0.75 | 104 | MIRPQ | AQGKKMIRPQPMEHK | 0 | 0 | 0 | 0 | 0 | 0 | 0 | 0 |
| DEN1 | −1.84 | 141 | TPECP | IDGPDTPECPDGQRA | 0 | 0 | 0 | 0 | 0 | 0 | 0 | 0 |
| DEN1 | −1.27 | 144 | CPDGQ | PDTPECPDGQRAWNI | 0 | 0 | 0 | 0 | 0 | 0 | 0 | 0 |
| DEN1 | −0.94 | 190 | KDSKA | MSAAIKDSKAVHADM | 0 | 0 | 0 | 0 | 0 | 0 | 0 | 1 |
| DEN1 | −1.17 | 206 | EKNET | YWIESEKNETWKLAR | 0 | 0 | 0 | 0 | 0 | 0 | 0 | 29 |
| DEN1 | −1.46 | 294 | NRGPS | DEHCGNRGPSLRTTT | 0 | 0 | 0 | 0 | 0 | 0 | 0 | 0 |
| DEN1 | −0.81 | 301 | TTTVT | GPSLRTTTVTGKIIH | 0 | 4 | 0 | 0 | 0 | 0 | 0 | 3 |
| DEN2 | −1.50 | 39 | SPSKL | KFQPESPSKLASAIQ | 0 | 0 | 0 | 0 | 0 | 0 | 0 | 5 |
| DEN2 | −2.00 | 105 | LRPQP | AGKRSLRPQPTELKY | 0 | 0 | 0 | 0 | 0 | 0 | 0 | 0 |
| DEN2 | −1.15 | 126 | STESH | KAKMLSTESHNQTFL | 0 | 0 | 0 | 0 | 0 | 0 | 0 | 1 |
| DEN2 | −1.43 | 142 | AECPN | DGPETAECPNTNRAW | 0 | 0 | 0 | 0 | 0 | 0 | 0 | 0 |
| DEN2 | −0.83 | 191 | DNRAV | SAAIKDNRAVHADMG | 0 | 0 | 0 | 0 | 0 | 0 | 0 | 1 |
| DEN2 | −1.03 | 248 | FAGPV | IIPKNFAGPVSQHNY | 0 | 0 | 0 | 0 | 0 | 0 | 0 | 0 |
| DEN2 | −1.02 | 262 | HTQTA | YRPGYHTQTAGPWHL | 0 | 0 | 0 | 0 | 0 | 0 | 0 | 0 |
| DEN2 | −1.37 | 291 | DCGNR | VVVTEDCGNRGPSLR | 0 | 0 | 0 | 0 | 0 | 0 | 0 | 0 |
| DEN3 | −1.40 | 37 | ADSPK | QYKFQADSPKRLATA | 0 | 0 | 0 | 0 | 0 | 0 | 0 | 0 |
| DEN3 | −1.33 | 103 | RTLTP | LKQGKRTLTPQPMEL | 0 | 0 | 0 | 0 | 0 | 0 | 0 | 1 |
| DEN3 | −1.80 | 140 | NTPEC | IIDGPNTPECPSASR | 0 | 0 | 0 | 0 | 0 | 0 | 0 | 0 |
| DEN3 | −0.90 | 190 | KDERA | MSAAVKDERAVHADM | 0 | 0 | 0 | 0 | 0 | 0 | 0 | 1 |
| DEN3 | −1.32 | 207 | KNGSW | WIESQKNGSWKLEKA | 0 | 0 | 0 | 0 | 0 | 0 | 0 | 0 |
| DEN3 | −1.11 | 257 | HRPGY | ISQHNHRPGYHTQTA | 0 | 0 | 0 | 0 | 0 | 0 | 0 | 0 |
| DEN3 | −0.86 | 290 | ENCGT | TVVITENCGTRGPSL | 0 | 0 | 0 | 0 | 0 | 0 | 0 | 0 |
| DEN3 | −0.86 | 301 | TTTVS | GPSLRTTTVSGKLIH | 0 | 3 | 0 | 0 | 0 | 0 | 0 | 2 |
| DEN4 | −1.18 | 39 | SPAHL | KFQPESPARLASAIL | 0 | 0 | 0 | 0 | 0 | 0 | 0 | 0 |
| DEN4 | −1.63 | 104 | ALTPP | TKGKRALTPPVSDLK | 0 | 15 | 0 | 0 | 1 | 0 | 0 | 1 |
| DEN4 | −1.07 | 125 | FTPEA | GKAKIFTPEARNSTF | 0 | 0 | 0 | 0 | 0 | 0 | 0 | 0 |
| DEN4 | −1.81 | 140 | DTSEC | LIDGPDTSECPNERR | 0 | 0 | 0 | 0 | 0 | 0 | 0 | 0 |
| DEN4 | −1.25 | 207 | KNQTW | WIESSKNQTWQIEKA | 0 | 0 | 0 | 0 | 0 | 0 | 0 | 0 |
| DEN4 | −1.20 | 248 | YAGPF | LIPKSYAGPFSQHNY | 0 | 0 | 0 | 0 | 0 | 0 | 0 | 0 |
| DEN4 | −1.01 | 260 | GYATQ | HNYRQGYATQTVGPW | 0 | 0 | 0 | 0 | 0 | 0 | 0 | 0 |
| DEN4 | −1.19 | 292 | CDHRG | TIQEDCDHRGPSLRT | 0 | 0 | 0 | 0 | 0 | 0 | 0 | 0 |
| WNV | −1.69 | 38 | PETPQ | RYKYYPETPQGLAKI | 0 | 0 | 0 | 0 | 0 | 0 | 0 | 1 |
| WNV | −1.16 | 102 | APKRL | GMYKSAPKRLTATTE | 2 | 0 | 9 | 0 | 0 | 0 | 0 | 1 |
| WNV | −1.43 | 144 | ECPTQ | GPETKECPTQNRAWN | 0 | 0 | 0 | 0 | 0 | 0 | 0 | 0 |
| WNV | −1.74 | 177 | NTTEC | KVRESNTTECDSKII | 10 | 3 | 0 | 0 | 0 | 0 | 0 | 1 |
| WNV | −1.47 | 261 | GYKTQ | HNRRPGYKTQNQGPW | 0 | 0 | 11 | 0 | 0 | 0 | 0 | 0 |
| WNV | −1.90 | 266 | NQGPW | GYKTQNQGPWDEGRV | 0 | 0 | 11 | 0 | 0 | 0 | 0 | 0 |
| WNV | −1.67 | 297 | GPATR | SCGHRGPATRTTTES | 0 | 0 | 0 | 0 | 0 | 0 | 0 | 0 |
| WNV | −1.54 | 303 | TTESG | PATRTTTESGKLITD | 0 | 0 | 0 | 0 | 0 | 0 | 0 | 1 |
| YF | −1.21 | 35 | YYPED | LNKYSYYPEDPVKLA | 0 | 0 | 0 | 0 | 0 | 0 | 0 | 0 |
| YF | −1.41 | 140 | SRKEC | IIDGKSRKECPFSNR | 0 | 0 | 0 | 0 | 0 | 0 | 0 | 2 |
| YF | −2.21 | 193 | KSAHG | AVNGKKSAHGSPTFW | 0 | 0 | 0 | 0 | 0 | 0 | 0 | 2 |
| YF | −1.12 | 234 | GTSVE | LTHTIGTSVEESEMF | 0 | 0 | 0 | 0 | 0 | 0 | 0 | 2 |
| YF | −1.05 | 264 | QTNGP | PGYKVQTNGPWMQVP | 0 | 0 | 0 | 0 | 0 | 0 | 0 | 2 |
| YF | −2.05 | 295 | RGKST | GNCDGRGKSTRSTTD | 0 | 0 | 0 | 0 | 0 | 0 | 0 | 2 |
| YF | −2.15 | 301 | STTDS | GKSTRSTTDSGKVIP | 0 | 0 | 0 | 0 | 0 | 0 | 0 | 5 |
| YF | −1.15 | 338 | PRKTH | PMEIRPRKTHESHLV | 0 | 0 | 0 | 0 | 0 | 0 | 0 | 1 |
| ZIKV | −1.55 | 14 | KETRC | VDFSKKETRCGTGVF | 0 | 0 | 0 | 0 | 0 | 0 | 0 | 0 |
| ZIKV | −1.62 | 38 | HPDSP | DRYKYHPDSPRRLAA | 0 | 0 | 0 | 0 | 0 | 0 | 0 | 0 |
| ZIKV | −1.06 | 130 | AKTNN | HFVRAAKTNNSFVVD | 0 | 0 | 0 | 0 | 0 | 0 | 0 | 0 |
| ZIKV | −1.23 | 193 | GKEAV | GTAVKGKEAVHSDLG | 0 | 0 | 0 | 0 | 0 | 0 | 0 | 1 |
| ZIKV | −1.23 | 209 | KNDTW | WIESEKNDTWRLKRA | 0 | 0 | 0 | 0 | 0 | 0 | 0 | 1 |
| ZIKV | −1.36 | 259 | TREGY | LSHHNTREGYRTQMK | 0 | 0 | 0 | 0 | 0 | 0 | 0 | 0 |
| ZIKV | −0.86 | 291 | EETCG | TKVHVEETCGTRGPS | 0 | 0 | 0 | 0 | 0 | 0 | 0 | 1 |
| ZIKV | −1.56 | 303 | STTAS | GPSLRSTTASGRVIE | 0 | 1 | 0 | 0 | 0 | 0 | 0 | 0 |
| ZIKV | −1.85 | 341 | RKEPE | MEIRPRKEPESNLVR | 0 | 0 | 0 | 0 | 0 | 0 | 0 | 0 |

[1316] The diagnostic sets of B cell epitope peptides may be deployed, preferably but not necessarily as a 15mer, singly as arrays or as a pool of peptides to identify antibodies arising from infection by Zika or the other viruses represented. Many possible delivery formats are possible to attach peptides to a substrate including, but not limited to, directly, via biotin, via a histag, via am immunoglobulin Fc or other fusion partner. Said substrate and antigens can then be used in several different diagnostic immunoassay formats, including but not limited to ELISA, or on microbeads, or in solution. The presence of antibody specifically binding to the diagnostic peptide may be detected by a secondary antibody. A secondary antibody may be selected to detect bound IgG or IgM from human or from other potentially infected species of interest which may be infected and which may serve as reservoir species.

[1317] In an alternative approach to a diagnostic kit synthetic proteins from Zika envelope are prepared in which epitopes that are cross reactive with other flaviviruses are removed. Exemplars of these are shown in SEQS 393, 395 and 397. Said synthetic polypeptides may be the full soluble Zika envelope sequence. In preferred embodiments, however, polypeptides comprising only Domain I or Domain II or Domain II of the Zika envelope protein are synthesized. Said polypeptides may be fused to an immunoglobulin Fc molecule. In some instances, they are expressed as a Fc fusion in a host cell and subsequently cleaved to facilitate inclusion in the diagnostic kit.

### Example 11: Diagnostic Peptide Cross Reactions

[1318] By applying immunoinformatic methods previously described (PCT US2011/029192, PCT US2012/055038, and US2014/014523, U.S. Patent Application No. 62/306,262, each of which is incorporated herein by reference) we identified high probability B cell epitopes in Zika virus proteins and in the corresponding proteins of dengue serotypes, yellow fever and WNV. This resulted in a set of 8-14 peptides of interest selected for further examination for each virus. We then searched the proteins of various other pathogens likely to be co-endemic with these flaviviruses to determine if the corresponding pentamers were present. In the case of Plasmodium we searched the entire proteome of P. falciparum strain 3D7. The patterns of pentamer identity are shown in Tables 18 and 19. While a few peptides are in common with other flaviviruses, a far greater occurrence of cross reactions occurs with Plasmodium and the selected peptides in flaviruses of interest. Also noted is that Plasmodium does not have the peptides identified as “pan-flavi” or common to all the flaviviruses of interest. While this scan was performed only based on the selected set of 8-14 peptides it provided an indicator of probable cross reactivity and also of the absence of the pan flavi peptides in malaria. Thus diagnostics which depend on pan-flavi epitopes will fail to differentiate between the flaviviruses but will not result in false positives due to prior malaria infections. FIG. 24 provides further evidence of the absence of B cell epitopes in malaria which correspond to the fusion loop region of dengue and Zika.

### Example 12. Mapping of Epitopes in Envelope and NS1 Proteins and Malaria Proteomes

[1319] We conducted a complete epitope mapping of the proteome of P. falciparum strain 3D7 and P. vivax Sal1, each comprising in excess of 5000 proteins. Parameters mapped included B cell epitopes, MHC binding, cathepsin cleavage, T cell exposed motif usage and topology. A comparison of B cell epitope probability to every B cell epitope probability in the envelope and NS1 proteins of Zika, Den1 Den2 Den3 Den 4, YF and WNV was done. FIGS. 25-28 show the location of B cell epitope pentamer matches for Envelope and NS1 for Zika and for representative dengue exemplars. Similar data and graphics were generated for the other flaviviruses of interest Example 13: Tabulating B Cell Epitope Matches

[1320] We selected Zika peptides which have a B cell probability more than one standard deviation greater than the mean, comprising the top 15.86% in the the protein. We then identified those which corresponded to peptides with the same probability of being a B cell epitope in a protein of P. falciparum or P. vivax. Table 20 shows the results for Zika Envelope and Table 21 shows the results for Zika NS1. As the Asian American Zika virus has exhibited a high level of conservation these tables identify malaria protein epitopes which can provide cross protective antibodies. Selection of vaccine components should then take into consideration the life stage in which the malaria proteins identified are expressed, their surface exposure and transcription level to arrive at a final vaccine design.

[1321] Tables 22 and 23 provide corresponding in formation for other flaviviruses of interest based on a representative South American strain. Because minor strain variations may occur between isolates of each of these viruses the tables are considered indicative of the process of selecting matching Plasmodium epitopes but geographical differences may need to be factored into vaccine design.

[1322] It should be noted that in all following tables probability of B cell epitope binding is indicated as an inverted value; the most negative numbers indicate highest probability of binding.

TABLE 20

| | | | P_faclciparum | | P_vivax |
|---|---|---|---|---|---|
| | | | BEPI | | BEPI |
| | BEPI | BEPI | (standard | | (standard |
| | pentamer | (virus) | uTOPE) | gi: curation - P. falciparum | uTOPE) |
| SEQ 705 | ASDSR | −1.01 | | | −1.57 |
| SEQ 706 | SRCPT | −1.80 | | | −1.03 |
| SEQ 707 | CPTQG | −1.64 | | | −1.05 |
| SEQ 708 | PTQGE | −1.38 | | | −2.04 |
| SEQ 709 | TQGEA | −1.04 | −1.74 | PF3D7_1240400_erythrocyte | −1.33 |
| | | | | membrane protein 1 | |
| SEQ 710 | DKQSD | −1.21 | −1.33 | PF3D7_0930400.2_conserved | −1.29 |
| | | | | Plasmodium protein | |
| SEQ 711 | QSDTQ | −1.41 | | | −1.68 |
| SEQ 712 | KMTGK | −1.12 | −1.49 | PF3D7_1408700_conserved | 0.03 |
| | | | | Plasmodium protein | |
| SEQ 713 | NDTGH | −1.04 | | | −1.19 |
| SEQ 714 | ETDEN | −2.06 | −1.07 | PF3D7_1115400_cysteine | −0.65 |
| | | | | proteinase falcipain 3 (FP3 | |
| SEQ 715 | TDENR | −1.77 | −1.07 | PF3D7_1425600_zinc finger | −1.69 |
| | | | | protein | |
| SEQ 716 | NSPRA | −1.98 | | | −1.05 |
| SEQ 717 | SPRAE | −1.89 | | | −1.58 |
| SEQ 718 | RAEAT | −1.31 | −0.91 | PF3D7_1430700_NADP-specific | −1.15 |
| | | | | glutamate dehydrogenase (GDH2) | |
| SEQ 719 | AGADT | −1.18 | | | −1.42 |
| SEQ 720 | GADTG | −1.52 | −0.38 | PF3D7_0931700_PIH1 domain- | −1.04 |
| | | | | containing protein | |
| SEQ 723 | ADTGT | −1.76 | −1.67 | PF3D7_1255200_erythrocyte | −1.06 |
| | | | | membrane protein 1 | |
| SEQ 724 | DIGTP | −1.90 | | | −1.30 |
| SEQ 725 | GAKGR | −1.32 | | PF3D7_1125500_small nuclear | −1.71 |
| | | | | ribonucleoprotein Sm D1 | |
| SEQ 726 | KGRES | −1.47 | −1.20 | PF3D7_0818900_heat shock | −0.56 |
| | | | | protein 70 (HSP70) | |
| SEQ 727 | AGTDG | −1.53 | −1.69 | PF3D7_1035200_S-antigen | −2.06 |
| SEQ 728 | GTDGP | −1.56 | | | −1.80 |
| SEQ 729 | TDGPC | −1.45 | −1.45 | PF3D7_1300300_erythrocyte | |
| | | | | membrane protein 1 | |
| SEQ 730 | DGPCK | −1.19 | −1.16 | PF3D7_0712900_erythrocyte | |
| | | | | membrane protein 1 | |
| SEQ 731 | ITEST | −1.43 | −0.25 | PF3D7_0104000_thrombospondin- | −1.05 |
| | | | | related | |
| | | | | sporozoite protein (TRSP) | |
| SEQ 732 | TESTE | −1.62 | −1.93 | PF3D7_1122600_conserved | −0.51 |
| | | | | Plasmodium protein | |
| SEQ 733 | ESTEN | −1.51 | −0.98 | PF3D7_0205300_conserved | −1.23 |
| | | | | Plasmodium protein | |
| SEQ 734 | STENS | −1.30 | −1.03 | PF3D7_1418100_liver specific | −1.63 |
| | | | | protein 1 | |
| SEQ 735 | TENSK | −1.05 | −1.27 | PF3D7_1418100_liver specific | |
| | | | | protein 1 | |
| SEQ 736 | GSTIG | −1.10 | −0.40 | PF3D7_1205500_zinc finger | −1.04 |
| | | | | protein | |
| SEQ 737 | NTKNG | −1.29 | −1.57 | PF3D7_0904900_copper- | −1.11 |
| | | | | transporting ATPase (CuTP) | |
| SEQ 738 | TKNGS | −1.42 | −0.88 | PE3D7_1000100_erythrocyte | −1.87 |
| | | | | membrane protein 1 | |

| | gi: curation (P_vivax) | pos | Virus |
|---|---|---|---|
| SEQ 705 | PVX_085120_protein kinase | 70 | Zika |
| SEQ 706 | PVX_093705_variable surface protein | 73 | Zika |
| | Vir18 | | |
| SEQ 707 | PVX_095125_hypothetical protein | 75 | Zika |
| SEQ 708 | PVX_084330_hypothetical protein | 76 | Zika |
| SEQ 709 | PVX_018660_unspecified | 77 | Zika |
| SEQ 710 | PVX087865_hypothetical protein | 84 | Zika |
| SEQ 711 | PVX_122920_hypothetical protein | 86 | Zika |
| SEQ 712 | PVX_122905_hypothetical protein | 125 | Zika |
| SEQ 713 | PVX_054190_unspecified | 155 | Zika |
| SEQ 714 | PVX_10072_hypothetical protein | 160 | Zika |
| SEQ 715 | PVX_085020_autophagy protein 5 | 161 | Zika |
| SEQ 716 | PVX_116560_RNA-binding protein | 173 | Zika |
| SEQ 717 | PVX116690_hypothetical protein | 174 | Zika |
| SEQ 718 | PVX_111070_S-adenosylmethionine | 176 | Zika |
| | decarboxylase-ornithine decarboxylase | | |
| SEQ 719 | PVX_089985_hypothetical protein | 228 | Zika |
| SEQ 720 | PVX_118475_stromal-processing | 229 | Zika |
| | peptidase | | |
| SEQ 723 | PVX_113550_hypothetical protein | 230 | Zika |
| SEQ 724 | PVX_113550_hypothetical protein | 231 | Zika |
| SEQ 725 | PVX_081345_secreted ookinete protein | 280 | Zika |
| SEQ 726 | PVX_003880_acyl_carrier protein | 282 | Zika |
| SEQ 727 | PVX_117880_rhoptry neck protein 2 | 334 | Zika |
| SEQ 728 | PVX_001810_hypothetical protein | 335 | Zika |
| SEQ 729 | | 336 | Zika |
| SEQ 730 | | 337 | Zika |
| SEQ 731 | PVX_122795_hypothetical protein | 366 | Zika |
| SEQ 732 | PVX_101210_hypothetical protein | 367 | Zika |
| SEQ 733 | PVX_115350_hypothetical protein | 368 | Zika |
| SEQ 734 | PVX_122470_eukaryotic translation | 369 | Zika |
| | initation factor 4 gamma | | |
| SEQ 735 | | 370 | Zika |
| SEQ 736 | PVX_082915_ABC transporter B family | 405 | Zika |
| | member 5 | | |
| SEQ 737 | PVX_082580_20 kDa chaperonin | 479 | Zika |
| SEQ 738 | PVX_080580_hypothetical protein | 480 | Zika |

TABLE 21

| | | | P_faclciparum | | P_vivax | | | |
|---|---|---|---|---|---|---|---|---|
| | | | BEPI | | BEPI | | | |
| | BEPI | BEPI | (standard | | (standard | | | |
| | penta | (virus) | uTOPE) | gi: curation | uTOPE) | gi: curation (P_vivax) | pos | Virus |
| SEQ 739 | SKKET | −1.13 | −1.61 | PF3D7_1401200_Plasmodium | −1.36 | PVX_084440_hypothetical protein | 12 | Zika |
| | | | | exported protein | | | | |
| SEQ 740 | KKETR | −1.43 | −1.07 | PF3D7_1138400_guanylyl cyclase | 0.23 | PVX_086240_serine_threonine protein | 13 | Zika |
| | | | | (GCalpha) | | phosphatase CPPED1 | | |
| SEQ 741 | YHPDS | −1.43 | −1.46 | PF3D7_0823800_DnaJ protein | −0.78 | PVX091085_hypothetical protein | 37 | Zika |
| SEQ 742 | HPDSP | −1.62 | | | −1.59 | PVX_091136_hypothetical protein | 38 | Zika |
| SEQ 743 | DSPRR | −1.26 | | | −1.37 | PVX_087955_O1 | 40 | Zika |
| SEQ 744 | AKTNN | −1.06 | | | −1.23 | PVX_100825_hypothelical protein | 130 | Zika |
| SEQ 745 | KTNNS | −1.09 | −2.07 | PF3D7_0202000_knob-associated | −1.44 | PVX_000975_liver specific protein 2 | 131 | Zika |
| | | | | histidine-rich protein (KAHRP) | | | | |
| SEQ 746 | KGKEA | −1.13 | −1.62 | PF3D7_0221700_Plasmodium | −0.93 | PVX_094855_NLI interacting factor-like | 192 | Zika |
| | | | | exported protein | | phosphatase | | |
| SEQ 747 | SEKND | −1.07 | −1.62 | PF3D7_0613900_myosin E | −1.47 | PVX_091434_rhoptry neck protein 4 | 207 | Zika |
| | | | | | | (RON4) | | |
| SEQ 748 | EKNDT | −1.23 | −1.00 | PF3D7_1428400_WD and | −1.55 | PVX_115415_hypothetical protein | 208 | Zika |
| | | | | tetratricopeptide repeats protein 1 | | | | |
| SEQ 749 | NTREG | −1.22 | −1.25 | PF3D7_1332000_syntaxin | −0.83 | PVX_082530_syntaxin 5 | 258 | Zika |
| SEQ 750 | GTRGP | −1.63 | | | −1.80 | PVX_092925_CCAAT-box DNA binding | 295 | Zika |
| | | | | | | protein subunit B | | |
| SEQ 751 | TRGPS | −1.55 | | | −1.36 | PVX_132260_unspecified | 296 | Zika |
| SEQ 752 | LRSTT | −1.63 | | | −1.14 | PYX_120335_unspecified | 301 | Zika |
| SEQ 753 | STTAS | −1.56 | | | −1.71 | PVX_113460_DNA repair protein | 303 | Zika |
| | | | | | | RAD50 | | |
| SEQ 754 | TTASG | −1.45 | −1.73 | PF3D7_0712900_erythrocyte | −1.87 | PVX_113460_DNA repair protein | 304 | Zika |
| | | | | membrane protein 1 | | RAD50 | | |
| SEQ 755 | TASGR | −1.25 | | | −1.00 | PVX_090110_transcription factor with | 305 | Zika |
| | | | | AP2 domain(s) | | | | |
| SEQ 756 | RPRKE | −1.59 | −1.10 | PF3D7_0935400_gametocyte | −1.53 | PVX_094890_hypothetical protein | 339 | Zika |
| | | | | development protein 1 (GDV1) | | | | |
| SEQ 757 | KEPES | −1.73 | −1.46 | PF3D7_1030100_pre-mRNA- | −0.06 | PVX_099540_glutamine synthelase | 342 | Zika |
| | | | | splicing factor ATP-dependent | | | | |
| | | | | RNA helicase PRP22 | | | | |
| SEQ 758 | EPESN | −1.52 | −1.10 | PF3D7_1001900_Plasmodium | −0.25 | PVX_123682_heterochromatin protein 1 | 343 | Zika |
| | | | | exported protein (hyp16) | | | | |

TABLE 22

| | | | | | P_faclciparum | | P. vivax | |
|---|---|---|---|---|---|---|---|---|
| | | Pos in | | | BEPI | | BEPI | |
| | | virus | BEPI | BEPI | (standard | | (standard | |
| Virus | | env | penta | (virus) | uTOPE) | gi: curation | uTOPE) | gi: curation (P_vivax) |
| WNV | SEQ 759 | 37 | KDKPT | −1.38 | −0.41 | PF3D7_131080_conserved Plasmodium | −1.97 | PVX_081215_hypothetical protein |
| | | | | | | protein | | |
| WNV | SEQ 760 | 83 | NEKRA | −1.55 | −0.17 | PF3D7_0526500_conserved Plasmodium | −1.29 | PVX_084330_hypothetical protein |
| | | | | | | protein | | |
| WNV | SEQ 761 | 84 | EKRAD | −1.44 | −1.04 | PF3D7_0703900_conserved Plasmodium | −0.72 | PVX_082850_hypothetical protein |
| | | | | | | membrane protein | | |
| WNV | SEQ 762 | 85 | KRADP | −1.25 | −0.86 | PF3D7_1039000_serine_threonine_protein | -1.35 | PVX_085070_rRNA (adenosine-2′-O-)- |
| | | | | | | kinase | | methyltransferase |
| WNV | SEQ 763 | 148 | TTVES | −1.11 | | | −1.12 | PVX_241295_unspecified |
| WNV | SEQ 764 | 154 | GKIGA | −1.08 | −0.33 | PF3D7_0600100_erythrocyte membrane | −1.04 | PVX_116760_hypothetical protein |
| | | | | | | protein 1 (PfEMP1) | | |
| WNV | SEQ 765 | 166 | ITPSA | −1.22 | −0.26 | PF3D7_1421200_40S ribosomal protein S25 | −1.21 | PVX_097815_trafficking protein particle |
| | | | | | | (RPS25) | | complex subunit 8 |
| WNV | SEQ 766 | 167 | TPSAP | −148 | | | −1.93 | PVX_085020_autophagy protein 5 |
| WNV | SEQ 767 | 168 | PSAPS | −1.60 | −2.30 | PF3D7_0800300_erythrocyte membrane | −2.12 | PVX_110965_hypothetical protein |
| | | | | | | protein 1 | | |
| WNV | SEQ 768 | 188 | EPRSG | −1.21 | | | −1.39 | PVX_116670_hypothetical protein |
| WNV | SEQ 769 | 223 | SSAGS | −1.23 | −0.90 | PF3D7_0401000_rifin (RIF) | −1.33 | PVX_118345_protein transport protein |
| | | | | | | | | SEC7 |
| WNV | SEQ 770 | 224 | SAGST | −1.38 | | | −2.03 | PVX_080355_transcrition factor with |
| | | | | | | | | AP2 domain(s) |
| WNV | SEQ 771 | 225 | AGSTT | −1.48 | −1.78 | PF3D7_0202000_knob-associated histidine- | −1.11 | PVX_089055_E3 ubiquitin-protein |
| | | | | | | rich protein (KAHRP) | | ligase |
| WNV | SEQ 772 | 253 | GSQEG | −1.07 | | | −1.78 | PVX_080320_ATP-dependent RNA |
| | | | | | | | | helicase DDX23 |
| WNV | SEQ 773 | 254 | SQEGA | −1.02 | −1.60 | PF3D7_0212300_peptide chain release factor | −1.90 | PVX_101355_protein phosphatase |
| | | | | | | subunit 1 | | PPM4 |
| WNV | SEQ 774 | 309 | ARTPA | −1 22 | | | −1.04 | PVX_089895_glutamyl-tRNA(Gln) |
| | | | | | | | | amidotransferase subunit A |
| WNV | SEQ 775 | 312 | PADTG | −1.86 | | | −1.90 | PVX_092395_hypothetical protein |
| WNV | SEQ 776 | 314 | DTGHG | −1.38 | | | −1.31 | PVX_054190_unspecified |
| WNV | SEQ 777 | 328 | GTDGP | −1.44 | | | −1.80 | PVX_001810_hypothetical protein |
| WNV | SEQ 778 | 329 | TDGPC | −1.18 | −1.45 | PF3D7_1300300_erythrocyte membrane | | |
| | | | | | | protein 1 | | |
| WNV | SEQ 779 | 396 | KSGSS | −1.27 | −2.30 | PF3D7_1200600_erythrocyte membrane | −1.72 | PVX_116765_vanant-silencing SET |
| | | | | | | protein 1 | | protein |
| WNV | SEQ 780 | 397 | SGSSI | −1.43 | −0.22 | PF3D7_1308900_mRNA-decapping enzyme 2 | −1.35 | PVX_013625_unspecified |
| WNV | SEQ 781 | 398 | GSSIG | −1.30 | −0.38 | PF3D7_1431600_ATP-specific succinyl- | −1.25 | PVX_123970_ataxin-3 |
| | | | | | | CoA synthetase beta subunit | | |
| DEN3 | SEQ 782 | 37 | KNKPT | −1.20 | −1.63 | PF3D7_201900_erythrocyte membrane | −1.31 | PVX_099980_merozoite surface protein |
| | | | | | | protein 3 (EMP3) | | 1 (MSP1) |
| DEN3 | SEQ 783 | 39 | KPTLD | −1.01 | −1.13 | PF3D7_1465100_conserved Plasmodium | −0.44 | PVX_081830_Plasmodium exported |
| | | | | | | protein | | protein |
| DEN3 | SEQ 784 | 48 | KTEAT | −1.16 | −1.45 | PF3D7_1342600_myosin A (MyoA) | −1.69 | PVX_097680_merozoite surface protein |
| | | | | | | | | 3 (MSP3_3) |
| DEN3 | SEQ 785 | 73 | SRCPT | −1.62 | | | −1.03 | PVX_093705_variable surface protein |
| | | | | | | | | Virl8 |
| DEN3 | SEQ 786 | 75 | CPTQG | −1.52 | | | −1.05 | PVX_095125_hypothetical protein |
| DEN3 | SEQ 787 | 76 | PTQGE | −1.19 | | | −2.04 | PVX_084330_hypothetical protein |
| DEN3 | SEQ 788 | 84 | PEEQD | −1.23 | −1.40 | PF3D7_1207800_conserved Plasmodium | | |
| | | | | | | protein | | |
| DEN3 | SEQ 789 | 85 | WWQDQ | −1.18 | −2.02 | PF3D7_1448500_conserved Plasmodium | −1.84 | PVX_088840_Phist protein Pf-fam-b) |
| | | | | | | protein | | |
| DEN3 | SEQ 790 | 151 | QVGNE | −1.40 | −1.21 | PF3D7_1255200_erythrocyte membrane | −0.91 | PVX_098950_hypothetical protein |
| | | | | | | protein 1 | | |
| DEN3 | SEQ 791 | 154 | NETQG | −1.49 | | | −1.56 | PVX_096115_protein kinase |
| DEN3 | SEQ 792 | 165 | PQAST | −1.71 | −2.09 | PF3D7_1115800_conserved Plasmodium | | |
| | | | | | | protein | | |
| DEN3 | SEQ 793 | 166 | QASTT | −1.50 | −1.11 | PF3D7_1149000_antigen 332 | −0.78 | PVX_117920_hypothetical protein |
| DEN3 | SEQ 794 | 167 | ASTTE | −1.26 | −1.85 | PF3D7_0202000_knob-associated histidine- | | |
| | | | | | | rich protein (KAHRP) | | |
| DEN3 | SEQ 795 | 220 | TSGAT | −1.21 | −0.72 | PF3D7_0727200_cysteine desulfurase | −1.64 | PVX_099415_GNS1_SUR4 domain |
| | | | | | | | | containing protein |
| DEN3 | SEQ 796 | 221 | SGATT | −1.46 | −2.07 | PF3D7_0712900_erythrocyte membrane | −1.86 | PVX_085725_hypothetical protein |
| | | | | | | protein 1 | | |
| DEN3 | SEQ 797 | 222 | GATTE | −1.70 | | | −1.63 | PVX_117880_rhoptry neck protein 2 |
| DEN3 | SEQ 798 | 223 | ATTET | −1.90 | −1.69 | PF3D7_1100200_erythrocyte membrane | −1.39 | PVX_002835_T-complex protein 1 |
| | | | | | | protein 1 | | subunit theta |
| DEN3 | SEQ 799 | 224 | TTETP | −2.03 | −1.27 | PF3D7_1200600_erythrocyte membrane | −2.00 | PVX_093680_Phist protein (Pf-fam-b) |
| | | | | | | protein | | |
| DEN3 | SEQ 800 | 225 | TETPT | −1.93 | | | −1.22 | PVX_097800_hypothetical protein |
| DEN3 | SEQ 801 | 270 | QNSGG | −1.58 | | | −2.03 | PVX_091775_leucine-rich repeat protein |
| | | | | | | | | (LRR11) |
| DEN3 | SEQ 802 | 271 | NSGGT | −1.44 | −1.60 | PF3D7_0833500_erythrocyte membrane | −1.94 | PVX_091660_hypothetical protein |
| | | | | | | protein 1 | | |
| DEN3 | SEQ 803 | 272 | SGGTS | −1.20 | −2.26 | PF3D7_0712300_erythrocyte membrane | −1.74 | PVX_089395_perforin-like protein 4 |
| | | | | | | protein 1 | | (PLP4) |
| DEN3 | SEQ 804 | 311 | VSETQ | −1.63 | −1.39 | PF3D7_1332200_conserved Plasmodium | −0.31 | PVX_090860_CPW-WPC family protein |
| | | | | | | protein. | | |
| DEN3 | SEQ 805 | 312 | SETQH | −1.44 | | | −1.24 | PVX_114800_hypothetical protein |
| DEN3 | SEQ 806 | 325 | YKGED | −1.39 | −1.26 | PF3D7_0621400_Pf77 protein (ALV7) | −0.84 | PVX_094800_hypothetical protein |
| DEN3 | SEQ 807 | 326 | KGEDA | −1.42 | | | −1.38 | PVX_089010_translation initiation factor |
| | | | | | | | | IF-2 |
| DEN3 | SEQ 808 | 327 | GEDAP | −1.24 | | | −1.33 | PVX_077695_unspecified |
| DEN3 | SEQ 809 | 337 | STEDG | −1.59 | | | −1.74 | PVX_092070_parasitophorous vacuolar |
| | | | | | | | | protein 1 |
| DEN3 | SEQ 810 | 3.38 | TEDGQ | −1.80 | −1.82 | PF3D7_1403100_conserved Plasmodium | | |
| | | | | | | protein | | |
| DEN3 | SEQ 811 | 339 | EDGQG | −1.86 | −2.17 | PF3D7_1206200_eukaryotic translation | −1.18 | PVX_089295_ATP-dependent RNA |
| | | | | | | initiation factor 3 subunit C | | helicase prh1 |
| DEN3 | SEQ 812 | 340 | DGQGK | −1.94 | −2.02 | PF3D7_1206200_eukaryotic translation | −1.07 | PVX_096180_hypothetical protein |
| | | | | | | initiation factor 3 subunit C | | |
| DEN3 | SEQ 813 | 342 | QGKAH | −1.80 | | | −1.07 | PVX_092415_hypothetical protein |
| DEN3 | SEQ 814 | 358 | TKKEE | −1.13 | −1.82 | PF3D7_1206200_eukaryotic translation | −0.43 | PVX_092070_parasitophorous vacuolar |
| | | | | | | initiation factor 3 subunit C | | protein 1 |
| DEN3 | SEQ 815 | 359 | KKEEP | −1.13 | −0.79 | PF3D7_1233600_asparagine and aspartate | −1.74 | PVX_118345_protein transport protein |
| | | | | | | rich protein 1 (AARP1) | | SEC7 |
| DEN3 | SEQ 816 | 367 | EAEPP | −1.24 | | | −1.29 | PVX_122665_hypothetical protein |
| DEN3 | SEQ 817 | 369 | EPPFG | −1.57 | | | −1.11 | PVX_118340_serine_threonine protein |
| | | | | | | | | kinase |
| DEN3 | SEQ 818 | 392 | KKGSS | −1.01 | −0.56 | PF3D7_1469600_biotin catboxylase subunit | −1.74 | PVX_112720_unspecified |
| | | | | | | of acetyl CoA carboxylase | | |
| DEN3 | SEQ 819 | 394 | GSSIG | −1.03 | −0.38 | PF3D7_1431600_ATP-specific succinyl- | −1.25 | PVX_123970_ataxin-3 |
| | | | | | | CoA synthetase beta subunit | | |
| DEN3 | SEQ 820 | 468 | NSKNT | −1.18 | −0.54 | PF3D7_1467200_WD repeat-containing | −1.15 | PVX_114965_hypothetical protein |
| | | | | | | protein 79 | | |
| DEN3 | SEQ 821 | 469 | SKNTS | −1.31 | −1.59 | PF3D7_0504700_centrosomal protein | | PVX_111430_cytochrome c oxidase |
| | | | | | | CEP120 | | copper chaperone |
| DEN3 | SEQ 822 | 470 | KNTSM | −1.25 | −1.13 | PF3D7_1035800_probable protein | −0.18 | PVX_100940_hypothetical protein |
| DEN4 | SEQ 823 | 37 | QGKPT | −1.16 | | | −1.35 | PVX_000975_liver specific protein 2 |
| DEN4 | SEQ 824 | 47 | TKTTA | −1.10 | −1.11 | PF3D7_1040600_rifin (RIF) | −1.64 | PVX_091755_calcium-dependent |
| | | | | | | protein kinase 6 | | |
| DEN4 | SEQ 825 | 48 | KTTAK | −1.18 | −0.82 | PF3D7_1255200_erythrocyte membrane | −1.67 | PVX_112685 unspecified |
| | | | | | | protein 1 | | |
| DEN4 | SEQ 826 | 49 | TTAKE | −1.07 | −0.22 | PF3D7_1150000_rifin (RIF) | −1.14 | PVX_122645_pre-mRNA-processing |
| | | | | | | | | factor 40 |
| DEN4 | SEQ 827 | 75 | CPTQG | −1.55 | | | −1.05 | PVX_095125_hypothetical protein |
| DEN4 | SEQ 828 | 76 | PTQGE | −1.49 | | | −2.04 | PVX_084330_hypothetical protein |
| DEN4 | SEQ 829 | 77 | TQGEP | −1.28 | | | −1.17 | PVX_099635_conserved Plasmodium |
| | | | | | | | | protein |
| DEN4 | SEQ 830 | 83 | LKEEQ | −1.03 | −0.65 | PF3D7_0504700_centrosomal protein | −1.06 | PVX_003885_ribosome-recycling factor |
| | | | | | | CEP120 | | |
| DEN4 | SEQ 831 | 84 | KEEQD | −1.08 | −0.63 | PF3D7_0618500_malate dehydrogenase | −1.75 | PVX_079865_Hsc70-interacting protein |
| | | | | | | (MDH) | | |
| DEN4 | SEQ 832 | 85 | EEQDQ | −1.12 | −2.02 | PF3D7_1448500_conserved Plasmodium | −1.84 | PVX_088840_Phist protein (Pf-fam-b) |
| | | | | | | protein | | |
| DEN4 | SEQ 833 | 147 | GDTHA | −1.06 | −0.87 | PF3D7_0930800_conserved Plasmodium | −1.21 | PVX_087780_phosphopantetheine |
| | | | | | | membrane protein | | adenylyltransferase |
| DEN4 | SEQ 834 | 153 | GNDTS | −1.54 | −1.41 | PF3D7_0731500_erythrocyte binding | −1.67 | PVX_095475_circumsporozoite- and |
| | | | | | | antigen-175 (EBA175) | | TRAP-related protein |
| DEN4 | SEQ 835 | 166 | TPRSP | −1.59 | | | −1.25 | PVX_113574_hypothetical protein |
| DEN4 | SEQ 836 | 167 | PRSPS | −1.43 | | | −1.14 | PVX_000815_sporozoite invasion- |
| | | | | | | | | associated protein 1 |
| DEN4 | SEQ 837 | 223 | AGADT | −1.32 | | | −1.42 | PVX_089985_hypothetical protein |
| DEN4 | SEQ 838 | 256 | SQEGA | −1.04 | −1.60 | PF3D7_0212300_peptide chain release factor | −1.90 | PVX101355_protein phosphatase |
| | | | | | | subunit 1 | | PPM4 |
| DEN4 | SEQ 839 | 266 | AGATE | −1.03 | −1.29 | PF3D7_0425800_erythrocyte membrane | −1.15 | PVX_081425_2-C-methyl-D-erythritol |
| | | | | | | protein 1 | | 4-phosphate cytidyly transferase |
| DEN4 | SEQ 840 | 267 | GATEV | −1.32 | −1.19 | PF3D7_0425800_erythrocyte membrane | −1.00 | PVX_111535_hypothetical protein |
| | | | | | | protein 1 | | |
| DEN4 | SEQ 841 | 271 | VDSGD | −1.78 | 0.05 | PF3D7_0905700.1_autophagy-related protein 3 | −1.29 | PVX_081575_hypothetical protein |
| DEN4 | SEQ 842 | 272 | DSGDG | −1.62 | −1.73 | PE3D7_1200600_erythrocyte membrane | −1.47 | PVX_100910_transcription factor with |
| | | | | | | protein 1 | | AP2 domain(s) |
| DEN4 | SEQ 843 | 273 | SGDGN | −1.34 | −1.84 | PE3D7_0712000_erythrocyte membrane | −0.82 | PVX_017140_unspecified |
| | | | | | | protein 1 | | |
| DEN4 | SEQ 844 | 274 | GDGNH | −1.01 | | | −1.22 | PVX_051690_unspecified |
| DEN4 | SEQ 845 | 314 | AETQH | −1.29 | | | −1.21 | PVX_115135_hypothetical protein |
| DEN4 | SEQ 846 | 328 | EGAGA | −1.44 | −1.69 | PE3D7_0425800_erythrocyte membrane | −1.48 | PVX_073690_unspecified |
| | | | | | | protein 1 | | |
| DEN4 | SEQ 847 | 359 | AENTN | −1.18 | −1.30 | PE3D7_0708700_Cg8 protein | −1.34 | PVX_090990_hypothetical protein |
| DEN4 | SEQ 848 | 361 | NTNSV | −1.19 | −0.78 | PE3D7_0802100_transcription factor with | −1.20 | PVX_086285_hypothetical protein |
| | | | | | | AP2 domain(s) (ApiAP2) | | |
| DEN4 | SEQ 849 | 371 | EPPFG | −1.01 | | | −1.11 | PVX_118340_serine_threonine protein |
| | | | | | | | | kinase |
| DEN4 | SEQ 850 | 470 | NSRNT | −1.57 | −1.06 | PE3D7_0110800_transcription initiation | −0.95 | PVX_117645_hypothetical protein |
| | | | | | | factor TFIIB | | |
| DEN4 | SEQ 851 | 471 | SRNTS | −1.42 | −1.36 | PE3D7_1469600_biotin carboxylase subunit | −1.35 | PVX_118062_chloroquine resistance |
| | | | | | | of acetyl CoA carboxylase | | marker protein |
| YF | SEQ 852 | 3 | DKPSL | −1.35 | −1.05 | PF3D7_0520100_protein phosphatase PPM9 | | |
| YF | SEQ 853 | 52 | DRPAE | −1.04 | | | −1.54 | PVX_096090_exonuclease 1 |
| YF | SEQ 854 | 76 | PSTGE | −1.69 | | | −1.77 | PVX_097885_hypothetical protein |
| YF | SEQ 855 | 77 | STGEA | −1.30 | | | −1.47 | PVX_082980_GPI mannosyltransferase 3 |
| YF | SEQ 856 | 84 | AEENE | −1.55 | −0.70 | PF3D7_1348200_step II splicing factor | −1.18 | PVX_0019.55_schizont egress antigen-1 |
| YF | SEQ 857 | 85 | EENEG | −1.83 | −1.70 | PF3D7_0500800_mature parasite-infected | −1.50 | PVX_116660_Micro-fibrillar-associated |
| | | | | | | erythrocyte surface antigen (MESA) | | protein 1 C-terminus domain containing |
| | | | | | | | | protein |
| YF | SEQ 858 | 86 | ENEGD | −1.95 | −1.74 | PF3D7_1332200_conserved Plasmodium | −1.76 | PVX_089085_protein KRII |
| | | | | | | protein | | |
| YF | SEQ 859 | 87 | NEGDN | −1.83 | −1.38 | PF3D7_1412600_deoxyhypusine synthase | −1.29 | PVX_119310_lipoamide acyltransferase |
| | | | | | | (DHS) | | component of branched-chain alpha-keto |
| | | | | | | | | acid dehydrogenase complex |
| YF | SEQ 860 | 96 | TYSDR | −1.18 | −0.68 | PF3D7_0418600_regulator of chromosome | −1.20 | PVX_013120_unspecified |
| | | | | | | condensation | | |
| YF | SEQ 861 | 148 | AKQEN | −1.02 | | | −1.25 | PVX_094275_hypothetical protein |
| YF | SEQ 862 | 164 | ALSGS | −1.15 | −1.04 | PF3D7_0629100_nicotinate | −0.94 | PVX_169270_unspecified |
| | | | | | | phosphoribosyltransferase | | |
| YF | SEQ 863 | 165 | LSGSQ | −1.22 | −1.30 | PF3D7_0704000_conserved Plasmodium | −1.51 | PVX_117205_hypothetical protein |
| | | | | | | membrane protein | | |
| YF | SEQ 864 | 166 | SGSQE | −1.09 | −1.15 | PF3D7_0712600_erythrocyte membrane | −1.75 | PVX_116765_variant-silencing SET |
| | | | | | | protein 1 | | protein |
| YF | SEQ 865 | 219 | QSGSG | −1.09 | | | −1.99 | PVX_114512_eukaryotic translation |
| | | | | | | | | initiation factor 2-alpha kinase |
| YF | SEQ 866 | 220 | SGSGG | −1.16 | −2.11 | PF3D7_0300100_erthrocyte membrane | −2.35 | PVX_123205_CCR4-associated factor 1 |
| | | | | | | protein 1 | | |
| YF | SEQ 867 | 221 | GSGGV | −1.05 | −1.49 | PF3D7_1373500_erythrocyte membrane | −1.57 | PVX_089655_ubiquitin carboxyl- |
| | | | | | | protein 1 | | terminal hydrolase 13 |
| YF | SEQ 868 | 249 | GNQEG | −1.42 | | | −1.75 | PVX_122250_hypothetical protein |
| YF | SEQ 869 | 250 | NQEGS | −1.50 | −0.31 | PF3D7_0108700_secreted ookinete protein | −1.17 | PVX_114512_eukaryotic translation |
| | | | | | | | | initiation factor 2-alpha kinase |
| YF | SEQ 870 | 251 | QEGSL | −1.41 | −1.04 | PF3D7_0617400_erythrocyte membrane | −1.36 | PVX_001040_transcription factor with |
| | | | | | | protein 1 | | AP2 domain(s) |
| YF | SEQ 871 | 265 | VTKDT | −1.36 | −1.04 | PF3D7_1009200_small subunit rRNA | | |
| | | | | | | synthesis-associated protein | | |
| YF | SEQ 872 | 266 | TKDTN | −1.62 | −1.46 | PF3D7_0600200_erythrocyte membrane | −1.75 | PVX_000730_exosome complex |
| | | | | | | protein 1 | | component RRP4 |
| YF | SEQ 873 | 267 | KDTND | −1.73 | −1.11 | PF3D7_1018200_serine_threonine protein | −1.70 | PVX_111090_hypothetical protein |
| | | | | | | phosphatase 8 | | |
| YF | SEQ 874 | 268 | DTNDN | −1.75 | −1.94 | PF3D7_1428400_WD and tetratricopeptide | −0.81 | PVX_113750_eukaryotic translation |
| | | | | | | repeats protein 1 | | initiation factor 3 subunit 6 interacting |
| | | | | | | | | protein |
| YF | SEQ 875 | 269 | TNDNN | −1.55 | −1.90 | PF3D7_1428400_WD and tetratricopeptide | −1.30 | PVX_119270_exportin-1 |
| | | | | | | repeats protein 1 | | |
| YF | SEQ 876 | 309 | KNPTD | −122 | −1.06 | PF3D7_1136900_subtilisin-like protease 2 | −0.98 | PVX_092210_hypothetical protein |
| | | | | | | (SUB2) | | |
| YF | SEQ 877 | 310 | NPTDT | −1.81 | | | −1.03 | PVX_092535_Adenylate and Guanylate |
| | | | | | | | | cyclase catalytic domain containing |
| | | | | | | | | protein |
| YF | SEQ 878 | 313 | DTGHG | −1.59 | | | −1.31 | PVX_054190_unspecified |
| YF | SEQ 879 | 314 | TGHGT | −1.04 | | | −1.31 | PVX_113390_hypothetical protein |
| YF | SEQ 880 | 326 | SKGAP | −1.20 | −0.52 | PF3D7_1453400_conserved Plasmodium | −1.75 | PVX_086245_nuclear formin-like |
| | | | | | | protein | | protein |
| YF | SEQ 881 | 327 | KGAPC | −1.05 | | | −1.03 | PVX_083220_hypothetical protein |
| YF | SEQ 882 | 357 | ASTND | −1.54 | −0.95 | PF3D7_0917100_N-glycosylasc_DNA lyase | −1.03 | PVX_00650_sentrin-specific protease 1 |
| YF | SEQ 883 | 358 | STNDD | −1.30 | −1.46 | PF3D7_1345100_thioredoxin 2 (TRX2) | −1.16 | PVX_085130_transporter |
| YF | SEQ 884 | 369 | NPPFG | −1.03 | | | −1.11 | PVX_002680_hypothetical protein |
| YF | SEQ 885 | 391 | HKEGS | −1.06 | −0.27 | PF3D7_9209000_6-cysteine protein (P230) | −1.11 | PVX_110920_acetyl-CoA transporter |
| YF | SEQ 886 | 392 | KEGSS | −1.27 | −0.47 | PF3D7_0209000_6-cysteine protein (P230) | −2.07 | PVX_000945_apical sushi protein |
| YF | SEQ 887 | 394 | GSSIG | −1.01 | −0.38 | PF3D7_1431600_ATP-specific succinyl- | −1.25 | PVX_123970_ataxin-3 |
| | | | | | | CoA synthetase beta subunit | | |
| DEN2 | SEQ 888 | 37 | KNKPT | −1.25 | −1.63 | PF3D7_0201900_erythrocyte membrane | −1.31 | PVX_099980_merozoite surface protein |
| | | | | | | protein 3 (EMP3) | | 1 (MSP1) |
| DEN2 | SEQ 889 | 50 | EAKQP | −1.80 | −1.16 | PF3D7_0306900_40S ribosomal protein S23 | −1.00 | PVX_119470_40S ribosomal protein |
| | | | | | | | | S23 |
| DEN2 | SEQ 890 | 69 | TTTES | −1.58 | −0.92 | PF3D7_0223500_erythrocyte membrane | −1.37 | PVX_000735_protein phosphatase |
| | | | | | | protein 1 | | PPM1 |
| DEN2 | SEQ 891 | 70 | TTESR | −1.44 | | | −1.25 | PVX_013625_unspecified |
| DEN2 | SEQ 892 | 73 | SRCPT | −1.60 | | | −1.03 | PVX_093705_variable surface protein |
| | | | | | | | | Vir18 |
| DEN2 | SEQ 893 | 75 | CPTQG | −1.88 | | | −1.05 | PVX_095125_hypothetical protein |
| DEN2 | SEQ 894 | 76 | PTQGE | −1.88 | | | −2.04 | PVX_084330_hypothetical protein |
| DEN2 | SEQ 895 | 77 | TQGEP | −1.76 | | | −1.17 | PVX_099635_conserved Plasmodium |
| | | | | | | | | protein |
| DEN2 | SEQ 896 | 78 | QGEPS | −1.51 | | | −1.20 | PVX_099635_conserved Plasmodium |
| | | | | | | | | protein |
| DEN2 | SEQ 897 | 84 | NEEQD | −1.28 | −1.45 | PF3D7_0408700_sporozoite micronemal | −1.66 | PVX_094890_hypothetical protein |
| | | | | | | protein essential for cell traversal (PLP1) | | |
| DEN2 | SEQ 898 | 85 | EEQDK | −1.0 | −0.93 | PF3D7_1472800_conserved Plasmodium | −1.31 | PVX_091570_myosin light chain B |
| | | | | | | protein | | |
| DEN2 | SEQ 899 | 146 | SGEEH | −1.20 | −0.85 | PF3D7_0800300_erythrocyte membrane | −1.47 | PVX_116680_vacuolar protein sorting- |
| | | | | | | protein 1 | | associated protein 52 |
| DEN2 | SEQ 900 | 147 | GEEHA | −1.18 | | | −1.30 | PVX_100970_hypothetical protein |
| DEN2 | SEQ 901 | 153 | GNDTG | −1.72 | −0.44 | PF3D7_0703500_erythrocyte membrane- | −1.69 | PVX_088045_hypothetical protein |
| | | | | | | associated antigen | | |
| DEN2 | SEQ 902 | 154 | NDTGK | −1.88 | −1.00 | PE3D7_1105500_centrin-4 (CEN4) | −0.80 | PVX_090955_centrin-4 |
| DEN2 | SEQ 903 | 155 | DTGKH | −1.99 | −1.01 | PF3D7_0305100_conserved Plasmodium | −0.96 | PVX_114725_metacaspase 1 |
| | | | | | | protein | | |
| DEN2 | SEQ 904 | 156 | TGKHG | −1.96 | −1.53 | PF3D7_1204300_eukaryotic translation | −1.00 | PVX_003635_hypothetical protein |
| | | | | | | initiation factor 5A (EIF5A) | | |
| DEN2 | SEQ 905 | 157 | GKHMK | −1.61 | −1.79 | PF3D7_1234600_conserved Plasmodium | −0.82 | PVX_081755_hypothetical protein |
| | | | | | | protein | | |
| DEN2 | SEQ 906 | 158 | KHGKE | −1.22 | −1.47 | PF3D7_1444500_eukaryotic initiation factor | −0.13 | PVX_123283_JmjC domain containing |
| | | | | | | 2alpha kinase 1 (IK1) | | protein (JmjC1) |
| DEN2 | SEQ 907 | 166 | TPQSS | −1.92 | | | −1.01 | PVX_003795_serine-repeat antigen |
| | | | | | | | | (SERA) |
| DEN2 | SEQ 908 | 167 | PQSST | −2.13 | | | −1.09 | PVX_114115_hypothetical protein |
| DEN2 | SEQ 909 | 168 | QSSTT | −2.09 | −1.35 | PF3D7_0520100_protein phosphatase PPM9 | | |
| DEN2 | SEQ 910 | 169 | SSTTE | −1.92 | −1.81 | PF3D7_0420900_erythrocyte membrane | −1.73 | PVX_097835_DNA mismatch repair |
| | | | | | | protein 1 | | protein MSH6 |
| DEN2 | SEQ 911 | 170 | STTEA | −1.80 | −2.02 | PF3D7_0502600_conserved Plasmodium | −1.25 | PVX_122240_carbamoyl phosphate |
| | | | | | | protein | | synthetase |
| DEN2 | SEQ 912 | 171 | TTEAE | −1.50 | | | −1.60 | PVX_097705_merozoite surface protein |
| | | | | | | | | 3 (MSP3_8) |
| DEN2 | SEQ 913 | 224 | GADTQ | −1.55 | | | −1.49 | PVX_004537_VIR protein |
| DEN2 | SEQ 914 | 225 | ADTQG | −1.62 | −0.31 | PF3D7_1020300_cytoplasmic dynein | −1.09 | PVX_088215_hypothetical protein |
| | | | | | | intermediate chain | | |
| DEN2 | SEQ 915 | 226 | DTQGS | −1.65 | | | −1.42 | PVX_087780_phosphopantetheine |
| | | | | | | | | adenylyltransferase |
| DEN2 | SEQ 916 | 227 | TQGSN | −1.45 | −1.20 | PF3D7_1112300_conserved Plasmodium | −1.97 | PVX_073690_unspecified |
| | | | | | | protein | | |
| DEN2 | SEQ 917 | 244 | PHAKK | −1.44 | −0.50 | PF3D7_1412100_conserved Plasmodium | −1.32 | PVX_091105_endoplasmic reticulum |
| | | | | | | protein | | resident calcium binding protein |
| DEN2 | SEQ 918 | 314 | AETQH | −1.05 | | | −1.21 | PVX_115135_hypothetical protein |
| DEN2 | SEQ 919 | 327 | YFGDG | −1.54 | | | −1.32 | PVX_003645_hypothetical protein |
| DEN2 | SEQ 920 | 328 | EGDGS | −1.74 | −1.63 | PF3D7_1035800_probable protein | −1.94 | PVX_089085_protein KR11 |
| DEN2 | SEQ 921 | 329 | GDGSP | −1.64 | | | −1.97 | PVX_122940_hypothetical protein |
| DEN2 | SEQ 922 | 330 | DGSPC | −1.27 | −1.04 | PF3D7_1240600_erythrocyte membrane | −0.76 | PVX_092345_DNA-directed RNA |
| | | | | | | protein 1 | | polymerase 1 subunit RPA2 |
| DEN2 | SEQ 923 | 360 | TEKDS | −1.11 | | | −1.75 | PVX_084195_origin recognition |
| | | | | | | | | complex subunit 1 |
| DEN2 | SEQ 924 | 361 | EKDSP | −1.19 | −2.14 | PF3D7_0624600_SNF2 helicase | −1.74 | PVX_092945_sporozoite and liver stage |
| | | | | | | | | asparagine-rich protein (KARP) |
| DEN2 | SEQ 925 | 363 | DSPVN | −1.24 | −0.80 | PF3D7_1104500_WD repeat-containing | −1.20 | PVX_123935_haloacid dehalogenase- |
| | | | | | | protein | | like hydrolase |
| DEN2 | SEQ 926 | 369 | EAEPP | −1.31 | | | −1.29 | PVX_122665_hypothetical protein |
| DEN2 | SEQ 927 | 371 | EPPFG | −1.48 | | | −1.11 | PVX_118340_serine_threonine protein |
| | | | | | | | | kinase |
| DEN2 | SEQ 928 | 372 | PPFGD | −1.14 | | | −1.28 | PVX_081330_LCCL domain-containing |
| | | | | | | | | protein (CCp5) |
| DEN2 | SEQ 929 | 396 | GSSIG | −1.02 | −0.38 | PF3D7_1431600_ATP-specific succinyl- | −1.25 | PVX_123970_ataxin-3 |
| | | | | | | CoA synthetase beta subunit | | |
| DEN2 | SEQ 930 | 471 | SRSTS | −1.34 | −1.54 | PF3D7_0207700_serine repeat antigen 4 | −1.54 | PVX_111025_vesicle transport-related |
| | | | | | | (SERA4) | | protein |
| DEN2 | SEQ 931 | 472 | RSTSL | −1.32 | −1.05 | PF3D7_0410000_erythrocyte vesicle protein | 0.73 | PVX_116655_hypothetical protein |
| | | | | | | 1 (EVP1) | | |
| DEN1 | SEQ 932 | 38 | KNKPT | −1.29 | −1.63 | PF3D7_0201900_erythrocyte membrane | −1.31 | PVX_099980_merozoite surface protein |
| | | | | | | protein 3 (EMP3) | | 1 (MSP1) |
| DEN1 | SEQ 933 | 67 | ISNTT | −1.82 | −0.10 | PF3D7_0712500_rifin | −1.16 | PVX_032190_unspecified |
| DEN1 | SEQ 934 | 68 | SNTTT | −2.05 | −1.79 | PF3D7_1013500_phosphoinositide-specific | −1.56 | PVX_092570_transcription factor with |
| | | | | | | phospholipase C (PI-PLC) | | AP2 domain(s) |
| DEN1 | SEQ 935 | 69 | NTTTD | −1.95 | −1.47 | PF3D7_1443600_conserved Plasmodium | −0.53 | PVX_100705_hypothetical protein |
| | | | | | | protein | | |
| DEN1 | SEQ 936 | 70 | TTTDS | −1.67 | −1.50 | PFD7_0902200_serine_threonine protein | −1.35 | PVX_114955_hypothetical protein |
| | | | | | | kinase | | |
| DEN1 | SEQ 937 | 71 | TTDSR | −1.49 | −1.44 | PF3D7_1418100_liver specific protein 1 | −1.47 | PVX_114955_hypothetical protein |
| DEN1 | SEQ 938 | 74 | SRCPT | −1.74 | | | −1.03 | PVX_093705_variable surface protein |
| | | | | | | | | Vir18 |
| DEN1 | SEQ 939 | 76 | CPTQG | −1.75 | | | −1.05 | PVX_095125_hypothetical protein |
| DEN1 | SEQ 940 | 77 | PTQGE | −1.52 | | | −2.04 | PVX_084330_hypothelical protein |
| DEN1 | SEQ 941 | 78 | TQGEA | −1.16 | −1.74 | PF3D7_1240400_erythrocyte membrane | −1.33 | PVX_018660_unspecified |
| | | | | | | protein 1 | | |
| DEN1 | SEQ 942 | 152 | QVGNE | −1.47 | −1.21 | PF3D7_1255200_erythrocyte membrane | −0.91 | PVX_098950_hypothetical protein |
| | | | | | | protein | | |
| DEN1 | SEQ 943 | 154 | GNETT | −1.54 | −1.54 | PF3D7_0314700_zinc finger protein | −1.57 | PVX_096075_hypothetical protein |
| DEN1 | SEQ 944 | 155 | NETTE | −1.66 | −1.40 | PF3D7_0302200_cytoadherence linked | −1.60 | PVX_097800_hypothetical protein |
| | | | | | | asexual protein 32 (CLAG3_2) | | |
| DEN1 | SEQ 945 | 158 | TEHGT | −1.03 | | | −1.14 | PVX_080150_hypothetical protein |
| DEN1 | SEQ 946 | 170 | APTSE | −1.50 | | | −1.46 | PVX_089950_bifunctional dihydrofolate |
| | | | | | | | | reductase-thymidylate synthase |
| DEN1 | SEQ 947 | 188 | SPRTG | −1.08 | | | −1.85 | PVX_116604_hypothetical protein |
| DEN1 | SEQ 948 | 224 | SGAST | −1.72 | −1.41 | PF3D7_1015900_enolase (ENO) | −1.23 | PVX_095015_enolase |
| DEN1 | SEQ 949 | 225 | GASTS | −1.99 | −2.01 | PF3D7_0475800_erythrocyte membrane | −0.86 | PVX_047190_unspecified |
| | | | | | | protein 1 | | |
| DEN1 | SEQ 950 | 226 | ASTSQ | −2.09 | −0.75 | PF3D7_1437200_ribonucleoside-diphosphate | −1.36 | PVX_119790_hypothetical protein |
| | | | | | | reductase | | |
| DEN1 | SEQ 951 | 227 | STSQE | −2.09 | −2.24 | PF3D7_0215300_acyl-CoA synthetase | −1.36 | PVX_068190_unspecified |
| | | | | | | (ACS8) | | |
| DEN1 | SEQ 952 | 273 | QTSGT | −1.49 | −1.97 | PF3D7_1240300_erythrocyte membrane | | |
| | | | | | | protein 1 | | |
| DEN1 | SEQ 953 | 275 | SGTTT | −1.00 | −1.82 | PF3D7_0905100_nucleoporin | −1.52 | PVX_031690_unspecified |
| | | | | | | NUP100_NSP100 | | |
| DEN1 | SEQ 954 | 315 | AETQH | −1.29 | | | −1.21 | PVX_115135_hypothetical protein |
| DEN1 | SEQ 955 | 328 | YFGTD | −1.47 | −0.80 | PF3D7_1453900_conserved Plasmodium | −1.23 | PVX_090150_erythrocyte membrane- |
| | | | | | | protein | | associated antigen |
| DEN1 | SEQ 956 | 329 | EGTDA | −1.55 | | | −1.55 | PVX_030190_unspecified |
| DEN1 | SEQ 957 | 342 | QDEKG | −1.10 | −1.11 | PF3D7_0400400_erythrocyte membrane | −1.22 | PVX_116765_variant-silencing SET |
| | | | | | | protein 1 | | protein |
| DEN1 | SEQ 958 | 343 | DEKGV | −1.49 | −1.52 | PF3D7_1418100_liver specific protein 1 | 0.10 | PVX_095145_hypothetical protein |
| DEN1 | SEQ 959 | 347 | VTQNG | −1.23 | −1.47 | PF3D7_1421300_conserved_Plasmodium | −0.88 | PVX_085877_conserved Plasmodium |
| | | | | | | protein | | protein |
| DEN1 | SEQ 960 | 363 | KEKPV | −1.10 | −1.49 | PF3D7_0712600_erythrocyte membrane | | PVX_089925_hypothetical protein |
| | | | | | | protein 1 | | |
| DEN1 | SEQ 961 | 370 | ETEPP | −1.39 | −1.12 | PF3D7_0500800_mature parasite-infected | | |
| | | | | | | erythrocyte surface antigen (MESA) | | |
| DEN1 | SEQ 962 | 372 | EPPFG | −1.44 | | | −1.11 | PVX_118340_serine_threonine protein |
| | | | | | | | | kinase |
| DEN1 | SEQ 963 | 472 | SRSTS | −1.34 | −1.54 | PF3D7_0207700_serine repeat antigen 4 | −1.54 | PVX_111025_vesicle transport-related |
| | | | | | | (SERA4) | | protein |
| DEN1 | SEQ 964 | 473 | RSTSL | −1.20 | −1 05 | PF3D7_0410000_erythrocyte vesicle protein | 0.73 | PVX_116655_hypothetical protein |
| | | | | | | 1 (EVP1) | | |

TABLE 23

| | | | | | P. falciparum | | P_vivax | |
|---|---|---|---|---|---|---|---|---|
| | | | | | BEPI | | BEPI | |
| | | | Pos in | BEPI | (standard | | (standard | |
| Virus | BEPIpenta | | NS1 | (virus) | uTOPE) | gi: curation | uTOPE) | gi: curation (P_vivax) |
| DEN3 | DSPKR | SEQ 647 | 38 | −1.34 | | | −1.44 | PVX_088915_hypothetical protein |
| DEN3 | QGKRT | SEQ 1246 | 100 | −1.07 | −0.25 | PF3D7_1321300_conserved | −1.20 | PVX_123915_hypothetical protein |
| | | | | | | Plasmodium membrane protein | | |
| DEN3 | VTAET | SEQ 965 | 125 | −1.22 | | | −1.08 | PVX_019165_unspecified |
| DEN3 | TAETQ | SEQ 966 | 126 | −1.29 | −1.48 | PF3D7_0700100_erythrocyte | −0.76 | PVX_111180_28 kDa ookinete |
| | | | | | | membrane protein 1 | | surface protein |
| DEN3 | ETQNS | SEQ 967 | 128 | −1.07 | −1.78 | PF3D7_0815600_eukaryotic | −1.59 | PVX_089625_eukaryotic |
| | | | | | | translation initiation factor 3 subunit G | | translation initiation factor 3 |
| | | | | | | | | subunit 4 |
| DEN3 | NTPEC | SEQ 968 | 140 | −1.80 | | | −1.28 | PVX_100620_hypothetical protein |
| DEN3 | TPECP | SEQ 969 | 141 | −1.73 | | | −1.19 | PVX_086285_hypothetical protein |
| DEN3 | CPSAS | SEQ 970 | 144 | −1.14 | −0.98 | PF3D7_1355100_DNA replication | −1.31 | PVX_085195_hypothetical protein |
| | | | | | | licensing factor MCM6 (MCM6) | | |
| DEN3 | SQKNG | SEQ 971 | 205 | −1.16 | −1.54 | PF3D7_0314700_zinc finger protein | −1.05 | PVX_120845_unspecified |
| DEN3 | QKNGS | SEQ 972 | 206 | −1.28 | −1.02 | PF3D7_1319600_conserved | −1.29 | PVX_098655_hypothetical protein |
| | | | | | | Plasmodium protein | | |
| DEN3 | KNGSW | SEQ 973 | 207 | −1.32 | −0.62 | PF3D7_1203600_cytochrome c1 | −1.23 | PVX_114260_transcription factor |
| | | | | | | heme lyase | | with AP2 domain(s) |
| DEN3 | GTRGP | SEQ 974 | 293 | −1.65 | | | −1.80 | PVX_092925_CCAAT-box DNA |
| | | | | | | | | binding protein subunit B |
| DEN3 | TRGPS | SEQ 975 | 294 | −1.55 | | | −1.36 | PVX_132260_unspecified |
| DEN3 | SEKEE | SEQ 976 | 340 | −1.11 | −1.41 | PF3D7_1140000_carbonic | −0.45 | PVX_213290_unspecified |
| | | | | | | anhydrase (CA) | | |
| DEN3 | EKEEN | SEQ 977 | 341 | −1.11 | −1.66 | PF3D7_0500800_mature parasite- | −0.70 | PVX_238290_unspecified |
| | | | | | | infected erythrocyte surface antigen | | |
| | | | | | | (MESA) | | |
| DEN4 | FQPES | SEQ 978 | 35 | −1.41 | −0.42 | PF3D7_0720800_Hand-like protein | −1.36 | PVX_098620_hypothetical protein |
| DEN4 | PESPA | SEQ 979 | 37 | −1.64 | | | −1.31 | PVX_119380_hypothetical protein |
| DEN4 | ESPAR | SEQ 980 | 38 | −1.42 | −2.04 | PF3D7_0600200_erythrocyte | −1.87 | PVX_114405_hypothetical protein |
| | | | | | | membrane protein 1 | | |
| DEN4 | TPPVS | SEQ 981 | 106 | −1.07 | | | −1.03 | PVX_081495_hypothetical protein |
| DEN4 | GPDTS | SEQ 982 | 138 | −1.37 | −1.47 | PF3D7_1200400_erythrocyte | | |
| | | | | | | membrane protein 1 | | |
| DEN4 | TSECP | SEQ 983 | 141 | −1.74 | | | −1.28 | PVX_084715_hypothetical protein |
| DEN4 | REGSS | SEQ 984 | 173 | −1.07 | −2.13 | PF3D7_1351700_inner membrane | −1.73 | PVX_001040_transcription factor |
| | | | | | | complex protein 1f | | with AP2 domain(s) |
| DEN4 | EGSSE | SEQ 985 | 174 | −1.25 | −2.04 | PF3D7_0733000_erythrocyte | −1.36 | PVX_097583_skeleton-binding |
| | | | | | | membrane protein 1 | | protein 1 |
| DEN4 | GSSEV | SEQ 986 | 175 | −1.10 | −0.48 | PF3D7_0600400_erythrocyte | −1.16 | PVX_016140_unspecified |
| | | | | | | membrane protein 1 | | |
| DEN4 | SSKNQ | SEQ 987 | 205 | −1.02 | −1.97 | PF3D7_1228300_NIMA related | −0.89 | PVX_000525_protein kinase |
| | | | | | | kinase 1 (NEK1) | | domain containing protein |
| DEN4 | TTTAS | SEQ 988 | 301 | −1.51 | −1.28 | PF3D7_0716800_eukaryotic | −1.12 | PVX_049690_unspecified |
| | | | | | | translation initiation factor 3 subunit 1 | | |
| DEN4 | TTASG | SEQ 989 | 302 | −1.33 | −1.73 | PF3D7_0712900_erythrocyte | −1.87 | PVX_113460_DNA repair protein |
| | | | | | | membrane protein 1 | | RAD50 |
| DEN4 | TASGK | SEQ 990 | 303 | −1.09 | −1.72 | PF3D7_0712900_erythrocyte | −0.62 | PVX_118455_clathrin coat |
| | | | | | | membrane protein 1 | | assembly protein AP50 |
| DEN4 | LSEKE | SEQ 991 | 339 | −1.08 | −1.11 | PF3D7_1301800_surface-associated | −0.30 | PVX_014125_unspecified |
| | | | | | | interspersed protein 13_1 (SURFIN | | |
| | | | | | | 13 1) | | |
| DEN4 | SEKEE | SEQ 992 | 340 | −1.18 | −1.41 | PF3D7_1140000_carbonic | −0.45 | PVX_213290_unspecified |
| | | | | | | anhydrase (CA) | | |
| DEN4 | EKEEN | SEQ 993 | 341 | −1.20 | −1.66 | PF3D7_0500800_mature parasite- | −0.70 | PVX_238290_unspecified |
| | | | | | | infected erythrocyte surface antigen | | |
| | | | | | | (MESA) | | |
| YF | SPGRK | SEQ 994 | 126 | −1.38 | | | −1.21 | PVX_114115_hypothetical protein |
| YF | PGRKN | SEQ 995 | 127 | −1.36 | −1.22 | PF3D7_1325900_conserved | −1.28 | PVX_119750_ubiquitin-protein |
| | | | | | | Plasmodium protein | | ligase |
| YF | GRKNG | SEQ 996 | 128 | −1.10 | | | −1.66 | PVX_069690_unspecified |
| YF | KSRKE | SEQ 997 | 139 | −1.23 | −1.70 | PF3D7_0215800_origin recognition | −1.77 | PVX_097000_Plasmodium |
| | | | | | | complex subunit 5 (ORC5) | | exported ptotein |
| YF | VNGKK | SEQ 998 | 189 | −1.24 | −0.81 | PF3D7_0201900_erythrocyte | −1.06 | PVX_003735_DNA repair protein |
| | | | | | | membrane protein 3 (EMP3) | | RAD2 |
| YF | NGKKS | SEQ 999 | 190 | −1.61 | −0.85 | PF3D7_0709300_Cg2 protein | −1.24 | PVX_123855_histone chaperone |
| | | | | | | (CG2) | | ASF1 |
| YF | GKKSA | SEQ 1000 | 191 | −2.00 | −1.36 | PF3D7_0400400_erythrocyte | −1.88 | PVX_116985_biotin carboxylase |
| | | | | | | membrane protein 1 | | subunit of acetyl CoA carboxylase |
| YF | SAHGS | SEQ 1001 | 194 | −2.17 | | | −1.21 | PVX_091015_protein kinase |
| YF | AHGSP | SEQ 1002 | 195 | −1.82 | | | −1.54 | PVX_091015_protein kinase |
| YF | GGPVS | SEQ 1003 | 249 | −1.34 | | | −1.39 | PVX_101355_protein phosphatase |
| | | | | | | | | PPM4 |
| YF | VQTNG | SEQ 1004 | 263 | −1.00 | −0.10 | PF3D7_1442400_conserved | −1.09 | PVX_118340_serine_threonine |
| | | | | | | Plasmodium protein | | protein kinase |
| YF | GNCDG | SEQ 1005 | 290 | −1.04 | | | −1.15 | PVX_001850_hypothetical protein |
| YF | DGRGK | SEQ 1006 | 293 | −2.00 | | | −1.05 | PVX_100970_hypothetical protein |
| YF | GRGKS | SEQ 1007 | 294 | −2.03 | −1.46 | PE3D7_1020700_histone | −1.03 | PVX_116765_variant-silencing |
| | | | | | | acetyltransferase | | SET protein |
| YF | RGKST | SEQ 1008 | 295 | −2.05 | | | −1.45 | PVX_097965_hypothetical protein |
| YF | GKSTR | SEQ 1009 | 296 | −2.14 | −1.17 | PF3D7_1111100_replication factor | −1.06 | PVX_089935_hypothetical protein |
| | | | | | | C subunit 5 | | |
| YF | KSTRS | SEQ 1010 | 297 | −2.36 | −1.48 | PF3D7_1413700_conserved | −1.60 | PVX_086050_hypothetical protein |
| | | | | | | Plasmodium protein | | |
| YF | STRST | SEQ 1011 | 298 | −2.62 | | | −1.21 | PVX_093655_sentrin-specilic |
| | | | | | | | | protease 2 |
| YF | TRSTT | SEQ 1012 | 299 | −2.73 | −1.05 | PF3D7_1479400_rifin (RIF) | −0.84 | PVX_065690_unspecified |
| YF | STTDS | SEQ 1013 | 301 | −2.15 | −1.60 | PF3D7_0600600_erythrocyte | −1.27 | PVX_094255_reticulocyte binding |
| | | | | | | membrane protein 1 (PfEMP1) | | protein 2b (RBP2b) |
| YF | TTDSG | SEQ 1014 | 302 | −1.81 | −0.94 | PE3D7_1333000_20 kDa | −1.10 | PVX_092630_hypothetical protein |
| | | | | | | chaperonin (CPN20) | | |
| YF | TDSGK | SEQ 1015 | 303 | −1.47 | −1.90 | PF3D7_0412400_erythrocyte | −0.86 | PVX_000970_pre-mRNA- |
| | | | | | | membrane protein 1 | | processing-splicing factor 8 |
| YF | DSGKV | SEQ 1016 | 304 | −1.10 | −0.22 | PF3D7_0821300_ATP-dependent | −1.13 | PVX_089015_ATP-dependent |
| | | | | | | RNA helicase prh1 | | RNA helicase DBP10 |
| YF | RKTHE | SEQ 1017 | 339 | −1.14 | −1.07 | PE3D7_0302000_pre-mRNA- | −1.31 | PVX_088940_hypothetical protein |
| | | | | | | splicing factor PRP46 | | |
| WNV | PETPQ | SEQ 1018 | 38 | −1.69 | −2.30 | PF3D7_0937800_erythrocyte | | PVX_096070_early transcribed |
| | | | | | | membrane protein 1 | | membrane protein (ETRAMP) |
| WNV | ETPQG | SEQ 1019 | 39 | −1.27 | −1.22 | PF3D7_1366300_conserved | −1.71 | PVX_081205_TatD-like |
| | | | | | | Plasmodium protein | | deoxyribonuclease |
| WNV | APKRL | SEQ 1020 | 102 | −1.16 | −0.22 | PF3D7_1465800_dynein beta chain | −1.19 | PVX_095355_kinesin-5 (EG5) |
| WNV | PETKE | SEQ 1021 | 140 | −1.48 | −1.57 | PF3D7_1373500_erythrocyte | −1.07 | PVX_113990_mitochondrial |
| | | | | | | membrane protein 1 | | import receptor subunit TOM40 |
| WNV | CPTQN | SEQ 1022 | 145 | −1.29 | −1.12 | PF3D7_1334000_conserved | | |
| | | | | | | Plasmodium protein | | |
| WNV | RESNT | SEQ 1023 | 174 | −1.48 | −1.22 | PF3D7_1120600_conserved | −0.94 | PVX_002680_hypothetical protein |
| | | | | | | Plasmodium protein | | |
| WNV | ESNTT | SEQ 1024 | 175 | −1.94 | −1.29 | PF3D7_0809100_erythrocyte | −1.30 | PVX_145260_unspecified |
| | | | | | | membrane protein 1 | | |
| WNV | SNTTE | SEQ 1025 | 176 | −2.02 | −2.02 | PF3D7_1368800_DNA repair | −1.16 | PVX_145260_unspecified |
| | | | | | | endonuclease | | |
| WNV | AGPRS | SEQ 1026 | 250 | −1.48 | −1.16 | PF3D7_0816500_small heat shock | | |
| | | | | | | protein HSP20 | | |
| WNV | RSNHN | SEQ 1027 | 253 | −1.54 | −1.23 | PF3D7_1367700_alanine--tRNA | −1.37 | PVX_118425_serin_threonine |
| | | | | | | ligase (AlaRS) | | protein kinase |
| WNV | RGPAT | SEQ 1028 | 296 | −1.56 | −1.64 | PF3D7_0600200_erythrocyte | −0.72 | PVX_113645_hypothetical protein |
| | | | | | | membrane protein 1 | | |
| WNV | ATRTT | SEQ 1029 | 299 | −2.20 | | | −1.13 | PVX_117340_hypothetical protein |
| WNV | TRTTT | SEQ 1030 | 300 | −2.28 | −1.27 | PF3D7_0901000_rifin (RIF) | −0.96 | PVX_085275_60S ribosomal |
| | | | | | | | | protein L5 |
| WNV | RTTTE | SEQ 1031 | 301 | −2.27 | | | −1.40 | PVX_099295_hypothetical protein |
| WNV | TTTES | SEQ 1032 | 302 | −1.91 | −0.92 | PF3D7_0223500_erythrocyte | −1.37 | PVX_000735_protein phosphatase |
| | | | | | | membrane protein 1 | | PPM1 |
| WNV | TTESG | SEQ 1033 | 303 | −1.54 | −1.49 | PF3D7_0209000_6-cysteine protein | −0.91 | PVX_071190_unspecified |
| | | | | | | (P230) | | |
| WNV | TESGK | SEQ 1034 | 304 | −1.18 | −2.56 | PF3D7_1459200_WD repeat- | −0.59 | PVX_115490_VIR protein |
| | | | | | | containing protein | | |
| DEN1 | DSPKR | SEQ 1035 | 38 | −1.45 | | | −1.44 | PVX_088915_hypothetical protein |
| DEN1 | GPDTP | SEQ 1036 | 138 | −1.38 | | | −1.51 | PVX_090230_early transcribed |
| | | | | | | | | membrane protein (ETRAMP) |
| DEN1 | IPECP | SEQ 1037 | 141 | −1.84 | | | −1.19 | PVX_086285_hypothetical protein |
| DEN1 | ECPDG | SEQ 1038 | 143 | −1.53 | | | −1.20 | PVX_131260_unspecified |
| DEN1 | SEKNE | SEQ 1039 | 205 | −1.12 | −0.35 | PF3D7_1403900_serin_threonine | −1.43 | PVX_003585_repetitive organellar |
| | | | | | | protein phosphatase CPPED1 | | protein |
| DEN1 | EKNET | SEQ 1040 | 206 | −1.17 | −1.55 | PF3D7_1430400_autophagy protein 5 | −0.88 | PVX_089085_protein KRI1 |
| DEN1 | NRGPS | SEQ 1041 | 294 | −1.46 | | | −1.86 | PVX_157260_unspecified |
| DEN1 | VKEKE | SEQ 1042 | 339 | −1.11 | −1.12 | PF3D7_0500800_mature parasite- | −0.66 | PVX_123025_selenoprotein |
| | | | | | | infected erythrocyte surface antigen | | |
| | | | | | | (MESA) | | |
| DEN1 | KEKEE | SEQ 1043 | 340 | −1.16 | −0.47 | PF3D7_1440200_stromal- | −1.29 | PVX_104695_unspecified |
| | | | | | | processing peptidase | | |
| DEN1 | EKEEN | SEQ 1044 | 341 | −1.16 | −1.66 | PF3D7_0500800_mature parasite- | −0.70 | PVX_238290_unspecified |
| | | | | | | infected erythrocyte surface antigen | | |
| | | | | | | (MESA) | | |
| DEN2 | FQPES | SEQ 1045 | 35 | −1.71 | −0.42 | PF3D7_0720800_Ham1-like protein | −1.36 | PVX_098620_hypothetical protein |
| DEN2 | PESPS | SEQ 1046 | 37 | −1.93 | −2.20 | PF3D7_0808700_erythrocyte | −1.66 | PVX_097815_trafficking protein |
| | | | | | | membrane protein 1 | | particle complex subunit 8 |
| DEN2 | ESPSK | SEQ 1047 | 38 | −1.67 | | | −1.89 | PVX_135260_unspecified |
| DEN2 | SPSKL | SEQ 1048 | 39 | −1.50 | −1.75 | PF3D7_1442700_conserved | 0.12 | PVX_084521_ABC transporter B |
| | | | | | | Plasmodium protein | | family member 7 |
| DEN2 | GKRSL | SEQ 1049 | 101 | −1.04 | −1.28 | PF3D7_0905300_dynein heavy | −0.24 | PVX_119465_T-complex protein |
| | | | | | | chain | | 1 subunit beta |
| DEN2 | STESH | SEQ 1050 | 126 | −1.15 | −1.53 | PF3D7_0206000_DNA repair | −1.55 | PVX_101435_DNA repair protein |
| | | | | | | protein RAD2 | | rhp16 |
| DEN2 | TESHN | SEQ 1051 | 127 | −1.03 | −1.04 | PF3D7_0425800_erythrocyte | | |
| | | | | | | membrane protein 1 | | |
| DEN2 | PETAE | SEQ 1052 | 139 | −1.23 | −1.65 | PF3D7_1100200_erythrocyte | −0.42 | PVX_123175_hypothetical protein |
| | | | | | | membrane | | protein 1 |
| DEN2 | PNTNR | SEQ 1053 | 145 | −1.08 | −0.80 | PF3D7_0410000_erythrocyte | −1.36 | PVX_123240_DEAD_DEAH box |
| | | | | | | vesicle protein 1 (EVP1) | | helicase |
| DEN2 | NRGPS | SEQ 1054 | 294 | −1.66 | | | −1.86 | PVX_157260_unspecified |
| DEN2 | TTTAS | SEQ 1055 | 301 | −1.43 | −1.28 | PF3D7_0716800_eukaryotic | −1.12 | PVX_049690_unspecified |
| | | | | | | translation initiation factor 3 subunit I | | |
| DEN2 | TTASG | SEQ 1056 | 302 | −1.24 | −1.73 | PF3D7_0712900_erythrocyte | −1.87 | PVX_113460_DNA repair protein |
| | | | | | | membrane protein 1 | | RAD50 |
| DEN2 | TASGK | SEQ 1057 | 303 | −1.05 | −1.72 | PF3D7_0712900_erythrocyte | −0.62 | PVX_118455_clathrin coat |
| | | | | | | membrane protein 1 | | assembly protein AP50 |

### Example 14: Correlation of Malaria B Cell Epitopes and Potential Autoimmune Epitopes

[1323] As we describe Zika virus carries pentamer B cell epitopes which match mimics in the human proteome and which may give rise to some of the adverse autoimmune diseases. Zika epitopes of particular interest in this regard are shown in Table 24; these are examples but should not be considered limiting. Notably we identified Zika B cell epitope matches with Plasmodium which overlap these but are displaced by one or more amino acids. This indicates that preexisting Plasmodium antibodies may bind Zika virus and create steric hindrance preventing the formation of antibodies to the adverse autoimmune epitopes. This is one mechanism by which Plasmodium antibodies may provide not only protection against Zika infection but also protect a patient against severe Zika associated autoimmune disease.

TABLE 24

| | | | |
|---|---|---|---|
| | | Near Neighbor | |
| | Human protein | Plasmodium | |
| Zika | containing | falciparum | |
| Pentamer | mimic BEPI | BEPI | Plasmodium Protein |

Envelope

| | | | |
|---|---|---|---|
| PRAEA | Platelet derived | RAEAT | PF3D7_1430700 |
| | growth factor | | product_NADP-specific |
| | receptor, | | glutamate |
| | optineurin | | dehydrogenase (GDH2) |
| TESTE | Synaptogyrin | TESTE | PF3D7_1122600 |
| | | | conserved Plasmodium |
| ESTEN | ProNeuropeptide | | protein |
| | Y | | |
| STENS | Duffy antigen | STENSK | PF3D7_1418100 |
| | | | product_liver |
| | | | specific protein 1 |

NS1

| | | | |
|---|---|---|---|
| SLAGP | Platelet | AGPLS | PF3D7_1150400 |
| | glycoprotein 1b | | product_erythrocyte |
| | | | membrane protein 1 |
| STTAS | Abnormal | TTASG | PF3D7_0712900 |
| | spindle protein | | product_erythrocyte |
| | in microcephaly | | membrane protein 1 |
| | ASPM | | |

### Example 15: Selected Malaria Antigens for Cross Protection

[1324] Peptides in the Zika envelope and NS1 proteins were identified which had highest probability of eliciting antibodies which provide protection. Where a corresponding high probability Plasmodium falciparum B cell epitope was identified, containing the same pentamer, the flanking regions on either side of this in the malaria protein were identified, thus defining a 15-mer with the matching pentamer central to the 15-mer. These Plasmodium proteins, and 15-mers defined therein, are identified in Table 25 and define immunogens which could provide protection against Zika if included in a vaccine.

[1325] In two cases a hexamer match is identified. The lateral ridge, or DE envelope loop of Zika contains the sequence STENSK, which is replicated in P. falciparum liver specific protein (PF3D7_1418100 liver specific protein 1). This protein is already under consideration as having potential as a malaria vaccine. A second matching hexamer, KKMTGK, is found in another conserved Plasmodium falciparum: protein (PF3D7_1408700 conserved Plasmodium protein); in this case the Zika peptide is in the Domain 1 of the envelope. For these two malaria proteins a 16-mer is defined which provides pentamer flanking regions to the hexamer.

[1326] While the focus of this invention is protection against Zika virus and the most serious diseases arising therefrom, it would be possible by using the matching pentamers and the extended peptides that comprise them, to design a vaccine which provides protection against both Plasmodium and Zika virus.

TABLE 25
15-mer and 16-mer immunogens from P. falciparum

| | | | | | | |
|---|---|---|---|---|---|---|
| | | pentamer | P_falciparum | | | |
| | | position | BEPI | | | |
| BEPI | BEPI | in Pf | (standard | | | |
| (virus) | penta | protein | uTOPE) | gi: curation | Malaria peptide | SEQ |

Zika Envelope protein matches

| | | | | | | |
|---|---|---|---|---|---|---|
| −1.04 | TQGEA | 988 | −1.74 | PF3D7_1240400 erythrocyte | SGEPQTQGEASSPSD | SEQ 1058 |
| | | | | membrane protein 1 | | |
| −1.21 | DKQSD | 474 | −1.33 | PF3D7_0930400.2 conserved | KELNSDKQSDKYISD | SEQ 1059 |
| | | | | Plasmodium protein | | |
| −0.87 | KKMTG | 1817 | −1.54 | PF3D7_1408700 conserved | DEKKKKMTGKEEQII | SEQ 1060 |
| | | | | Plasmodium protein | | |
| −1.12 | KMTGK | 1818 | −1.49 | PF3D7_1408700 conserved | EKKKKMTGKEEQIIV | SEQ 1061 |
| | | | | Plasmodium protein | | |
| −2.06 | ETDEN | 472 | −1.07 | PF3D7_1115400 cysteine | GYINLETDENGYKKT | SEQ 1062 |
| | | | | proteinase falcipain 3 (FP3) | | |
| −1.77 | TDENR | 1389 | −1.07 | PF3D7_1425600 zinc finger protein | DSSLFTDENREEKKD | SEQ 1063 |
| −1.31 | RAEAT | 270 | −0.91 | PF3D7_1430700 NADP-specific | GGSNIRAEATGYGVV | SEQ 1064 |
| | | | | glutamate dehydrogenase (GDH2) | | |
| −1.76 | ADTGT | 797 | −1.67 | PF3D7_1255200 erythrocyte | RPTQDADTGTDDIDD | SEQ 1065 |
| | | | | membrane protein 1 | | |
| −1.47 | KGRLS | 522 | −1.20 | PF3D7_0818900 heat shock protein | TITNDKGRLSQDEID | SEQ 1066 |
| | | | | 70 (HSP70) | | |
| −1.38 | GRLSS | 965 | −0.92 | PF3D7_1148000 serine_threonine | ELSGEGRLSSTGMYK | SEQ 1067 |
| | | | | protein kinase | | |
| −1.53 | AGTDG | 557 | −1.69 | PF3D7_1035200 S-antigen | EDKGGAGTDGELSHN | SEQ 1068 |
| −1.45 | TDGPC | 829 | −1.45 | PF3D7_1300300 erythrocyte | SRGTPTDGPCEGKGD | SEQ 1069 |
| | | | | membrane protein 1 | | |
| −1.19 | DGPCK | 1376 | −1.16 | PF3D7_0712900 erythrocyte | LERLKDGPCKNDSEE | SEQ 1070 |
| | | | | membrane protein 1 | | |
| −1.62 | TESTE | 1560 | −1.93 | PF3D7_1122600 conserved | DTRDKTESTENKVLS | SEQ 1071 |
| | | | | Plasmodium protein | | |
| −1.51 | ESTEN | 493 | −0.98 | PF3D7_0205300 conserved | DELIEESTENLNSQH | SEQ 1072 |
| | | | | Plasmodium protein | | |
| −1.30 | STENS | 1022 | −1.03 | PF3D7_1418100 liver specific | TNIEWSTENSKTNTT | SEQ 1073 |
| | | | | protein 1 | | |
| −1.05 | TENSK | 1023 | −1.27 | PF3D7_1418100 liver specific | NIEWSTENSKTNTTN | SEQ 1074 |
| | | | | protein 1 | | |
| −0.63 | ENSKM | 182 | −1.01 | PF3D7_0112000 TatD-like | KNEQVENSKMENGNK | SEQ 1075 |
| | | | | deoxyribonuclease | | |

Zika NS1 protein matches

| | | | | | | |
|---|---|---|---|---|---|---|
| −1.13 | SKKET | 209 | −1.61 | PF3D7_1401200 Plasmodium | FKGLSSKKETEEYVS | SEQ 1076 |
| | | | | exported protein | | |
| −1.43 | KKETR | 1388 | −1.07 | PF3D7_1138400 guanylyl cyclase | ICKGIEKKETRRWKR | SEQ 1077 |
| | | | | (GCalpha) | | |
| −1.43 | YHPDS | 140 | −1.46 | PF3D7_0823800 DnaJ protein | DLSKQYHPDSNKNCK | SEQ 1078 |
| −1.09 | KTNNS | 465 | −2.07 | PF3D7_0202000 knob-associated | NKNKEKTNNSKSDGS | SEQ 1079 |
| | | | | histidine-rich protein (KAHRP) | | |
| −1.13 | KGKEA | 177 | −1.62 | PF3D7_0221700 Plasmodium | RETYDKGKEAKSKRS | SEQ 1080 |
| | | | | exported protein | | |
| −0.78 | ESEKN | 816 | −1.14 | PF3D7_1018200 serine_threonine | YAACDESEKNVEEHP | SEQ 1081 |
| | | | | protein phosphatase 8 | | |
| −1.07 | SEKND | 533 | −1.62 | PF3D7_0613900 myosin E | FENEKSEKNDNYINV | SEQ 1082 |
| −1.23 | EKNDT | 758 | −1.00 | PF3D7_1428400 WD and | NKKNIEKNDTCNNNN | SEQ 1083 |
| | | | | tetratricopeptide repeats protein 1 | | |
| −1.22 | NTREG | 243 | −1.25 | PF3D7_1332000 syntaxin | IDISLTNTREGQNYL | SEQ 1084 |
| −0.57 | RTQMK | 939 | −0.92 | PF3D7_1206200 eukaryotic | FMQERRTQMKEEKSN | SEQ 1085 |
| | | | | translation initiation factor 3 subunit C | | |
| −0.42 | TQMKG | 244 | −1.04 | PF3D7_0404800 conserved | KQNNNTQMKGKQNNN | SEQ 1086 |
| | | | | Plasmodium protein | | |
| −0.53 | QMKGP | 479 | −1.40 | PF3D7_1230700 protein transport | NNNTNQMKGPPGQMN | SEQ 1087 |
| | | | | protein SEC13 (SEC13) | | |
| −1.45 | TTASG | 1887 | −1.73 | PF3D7_0712900 erythrocyte | PSGNNTTASGKNTPS | SEQ 1088 |
| | | | | membrane protein 1 | | |
| −1.59 | RPRKE | 565 | −1.10 | PF3D7_0935400 gametocyte | DIIYKIRPRKENKNV | SEQ 1089 |
| | | | | development protein 1 (GDV1) | | |
| −1.73 | KEPES | 818 | −1.46 | PF3D7_1030100 pre-mRNA- | EILHSKEPESDYVEA | SEQ 1090 |
| | | | | splicing factor ATP-dependent RNA | | |
| | | | | helicase PRP22 | | |
| −1.52 | EPESN | 36 | −1.10 | PF3D7_1001900 Plasmodium | SSSKMEPESNRYIKG | SEQ 1091 |
| | | | | exported protein (hyp16) | | |

16 mer peptides from envelope

| | | | | |
|---|---|---|---|---|
| STENSK | 1022 | PFS3D7_1418100 liver specific protein 1 | TNIEWSTENSKTNTTN | SEQ 1092 |
| KKMTGK | 1817 | PF3D7_1408700 conserved Plasmodium protein | DEKKKKMTGKEEQIIV | SEQ 1093 |

[1327] Analysis of P falciparum and P vivax was initially carried out using the well characterized type strains 3D7 and Sal1 respectively. In order to evaluate whether the same B cell epitopes are consistently present in wild type Plasmodium strains and therefore whether natural infection would offer the same protection against Zika infection we searched for the presence of the two hexamers. Both STENSK and KKMTGK are conserved in 16 isolates of P. falciparum examined from diverse different geographical sources.

[1328] Immunogen polypeptides were prepared based on the P PF3D7_1418100 liver specific protein 1 peptide shown as SEQ 1092 above. In one instance the peptide was flanked by adjoining wildtype sequences to provide a 70 amino acid polypeptide to which an additional cysteine was added. In a second instance a T cell epitope from ZIKV was inserted into the C terminal flank of STENSK. In some embodiments, His tags were added to N or C terminal of the Plasmodium polypeptide to facilitate purification. The rationale was to provide both B cell and T helper motifs which would be present in a wild type ZIKV challenge while not creating the same mimics present in ZIKV. The resultant Sequences are shown below. These were then expressed by stable transfection into CHO cells as previously described.

[1329] Seq.1094. P. falciparum LISP, Nucleotide Sequence

[1330] 1-63 Signal peptide

[1331] 70-252 falciparum LISP

[1332] Seq.1095. P. falciparum LISP, Amino Acid Sequence

[1333] 1-21 Signal peptide

[1334] 24-84 falciparum LISP

[1335] Seq.1096. 6× His-P. falciparum LISP, Nucleotide Sequence

[1336] 1-63 Signal peptide

[1337] 70-87 6× Histag

[1338] 88-270 falciparum LISP

[1339] Seq.1097. 6× His-P. falciparum LISP, Amino Acid Sequence

[1340] 1-21 Signal peptide

[1341] 24-29 6× Histag

[1342] 30-90 falciparum LISP

[1343] Seq.1098. P. falciparum LISP-6× His, Nucleotide Sequence

[1344] 1-63 Signal peptide

[1345] 70-252 falciparum LISP

[1346] 253-270 6× Histag

[1347] Seq.1099. P. falciparum LISP-6× His, Amino Acid Sequence

[1348] 1-20 Signal peptide

[1349] 21-131 Light chain variable region

[1350] Seq.1100. P. falciparum LISP with ZV Tcell Epitope, Nucleotide Sequence

[1351] 1-63 Signal peptide

[1352] 70-282 falciparum LISP with ZV T cell epitope

[1353] Seq.1 101. P. falciparum LISP with ZV Tcell Epitope, Amino Acid Sequence

[1354] 1-21 Signal peptide

[1355] 22-94 falciparum LISP with ZV T cell epitope

[1356] Seq.1102. 6× His-P. falciparum LISP with ZV Tcell Epitope, Nucleotide Sequence

[1357] 1-63 Signal peptide

[1358] 70-87 6× Histag

[1359] 88-300 falciparum LISP with ZV T cell epitope

[1360] Seq.1103. 6× His-P. falciparum LISP with ZV Tcell Epitope, Amino Acid Sequence

[1361] 1-21 Signal peptide

[1362] 24-29 6× Histag

[1363] 30-100 falciparum LISP with ZV T cell epitope

[1364] Seq.1104. P. falciparum LISP with ZV Tcell Epitope-6× His, Nucleotide Sequence, ID:500n

[1365] 1-63 Signal peptide

[1366] 70-282 falciparum LISP with ZV T cell epitope

[1367] 283-300 6× Histag

[1368] Seq.1105. P. falciparum LISP with ZV TceH Epitope-6× His, Amino Acid Sequence

[1369] 1-21 Signal peptide

[1370] 22-94 falciparum LISP with ZV T cell epitope

[1371] 95-100 6× Histag

### Example 16. Epitope Mimics in NS1 Corresponding to Cardiovascular Function Human Proteins

[1372] Epitope analysis of NS1 was conducted for an array of flaviviruses including four serotypes of dengue, yellow fever, Zika virus and Usutu virus, as well as St Louis encephalitis, West Nile, Japanese encephalitis, and Tick borne encephalitis. This included evaluation of the following criteria Table 26 and a matrix database for these parameters applied to each successive peptide was created. FIG. 31 shows a summary comparative depiction of the immunomic features of each.

TABLE 26

| Immunological | | |
|---|---|---|
| Metric | Method | Prediction |
| MHC I affinity | Neural Network Ensembles | LN (IC₅₀) |
| 9-mer | trained on binding data | std dev LN(IC₅₀) (ave = 0.5 LN (IC₅₀)) |
| | sliding window of 9-aa | standardized affinity within protein or proteome (enables using |
| | indexed by 1 amino acid | additivity of variance) |
| | 20 HLA-A | relative binding probability thresholds for each peptide |
| | 17 HLA-B | |
| | 6 murine | |
| MHC II affinity | Neural Network Ensembles | LN (IC₅₀) |
| 15-mer | trained on binding data | std dev LN(IC₅₀) (ave = 0.5-0.7 LN (IC₅₀)) |
| | sliding window of 15-amino | standardized affinity within protein or proteome (enables using |
| | acids indexed by 1 amino acid | additivity of variance) |
| | 16 DR | relative binding probability thresholds for each peptide |
| | 6 DP | |
| | 6DQ | |
| MHC + MHC II | MHC I + MHC II | Number of high affinity MHC I 9-mers within each high |
| cross presentation | simultaneous binding to | affinity MHC II 15-mer |
| | peptides in a protein | |
| Linear B-cell | Neural network trained on B- | probability of B cell binding standardized within protein |
| epitope 8-mer | cell epitopes | relative probability among peptides |
| | Sliding window of 8 amino | |
| | acids indexed by 1 aa | |
| Cathepsin | Neural Network Ensembles | Two independent predictions |
| cleavage | trained on large proteomic | probability of cleavage + probability of non-cleavage between |
| Human cathepsin | cleavage database mass | aa4 and aa5 (P1P1′) of an octomer |
| B, L and S | spectrometry of cleaved | |
| | peptides for the enzymes. | |
| Combined | Combination of 3 prediction | Probability of excision of various length peptides between 15- |
| cathepsin cleavage + | method outputs | 21 amino acids in length for MHC II and exactly 9 amino |
| MHC I + MHC II | | acids. |
| binding affinity | | |
| T-cell exposed | Frequency comparison to | Specific motifs exposed to T cell by peptide bound in MHC |
| motif (TCEM) | database for: | Frequency relative to IGHV germline and somatic mutation |
| relative to normal | continuous pentamer within a | Frequency relative to human proteome |
| human repertoires | bound MHC I 9-mer | Frequency relative to GI microbiome |
| | two discontinuous pentamers | |
| | (9-mer core of a bound MHC | |
| | II 15-mer) | |
| Combination of | Graphical/interactive | Interactive graphical platform for evaluation Treg potential |
| MHC I and MHC | combination of 5 different | based on combination of: |
| II binding by allele | prediction outputs | binding predictions and |
| in combination | | TCEM frequency data using additivity of variance |
| with TCEM T-cell | | |
| exposure and | | |
| cathepsin cleavage | | |
| Mimicry of B-cell | Pentamer (core of 9-mer BEPI | Proximity of MHC binding regions to BEPIs |
| receptors | prediction) exposure | Pentamer matches (random probability of match = 20⁻¹⁰) |
| (immunoglobulins) | comparison between proteins | BEPI probability classification matches between selected |
| | of interest (e.g. viral protein | proteins |
| | vs multiple isoforms of all | UniProt keyword screens |
| | proteins in human proteome) | URL connection to internet resources |
| | in combination with MHC | |
| | binding predictions | |
| Protein topology | Neural Network Ensembles | Amino acids of protein comprising extra-cellular domain |
| | Slider, graphical interface | Amino acids of protein comprising intra-cellular domains |
| | compared to Web references | Amino acids of protein comprising trans-membrane domains |
| | | Signal peptides cleavage point |

[1373] Particular attention was focused on the C terminal loop of NS1 lying between amino acids 280 and 329, bounded by cysteine residues, and more particularly between 290 and 311, likewise bounded by cysteine residues. This region contains not only strong predicted B cell epitope but also a region of high MHC II binding for multiple alleles as shown in FIG. 31 and FIG. 32 and in Table 27 below.

TABLE 27
Predicted MHC II binding of sequential peptides across NS1
280-329 for multiple flaviviruses. Prediction is the permuted
population average across 28 alleles of MHC II

| Index amino | Permuted average MHC II binding across 28 MHC II alleles | | | | | | | |
|---|---|---|---|---|---|---|---|---|
| acid Position# | DEN1 | DEN2 | DEN3 | DEN4 | YF | WNV | ZIKV | USUV |
| 280 | −0.55 | −0.76 | −0.74 | −0.05 | −0.56 | −1.14 | −0.60 | −1.25 |
| 281 | −0.38 | −0.40 | −0.67 | 0.05 | −0.51 | −0.90 | −0.74 | −1.02 |
| 282 | −0.11 | 0.05 | −0.63 | 0.10 | −0.39 | −0.44 | −0.78 | −0.71 |
| 283 | 0.10 | 0.40 | −0.55 | −0.04 | −0.31 | −0.04 | −0.71 | −0.49 |
| 284 | 0.06 | 0.43 | −0.55 | −0.28 | −0.32 | 0.04 | −0.75 | −0.44 |
| 285 | −0.17 | 0.28 | −0.57 | −0.39 | −0.27 | −0.08 | −0.74 | −0.50 |
| 286 | −0.39 | 0.16 | −0.63 | −0.36 | −0.13 | −0.04 | −0.80 | −0.52 |
| 287 | −0.39 | 0.19 | −0.58 | −0.40 | 0.16 | 0.05 | −0.73 | −0.44 |
| 288 | −0.31 | 0.19 | −0.44 | −0.42 | 0.54 | 0.29 | −0.59 | −0.34 |
| 289 | −0.38 | 0.04 | −0.33 | −0.47 | 0.85 | 0.41 | −0.52 | −0.31 |
| 290 | −0.52 | −0.24 | −0.36 | −0.56 | 0.98 | 0.35 | −0.52 | −0.40 |
| 291 | −0.69 | −0.56 | −0.54 | −0.67 | 1.01 | 0.17 | −0.58 | −0.54 |
| 292 | −0.84 | −0.82 | −0.77 | −0.76 | 0.89 | −0.09 | −0.65 | −0.66 |
| 293 | −0.88 | −0.84 | −0.82 | −0.81 | 0.79 | −0.26 | −0.59 | −0.64 |
| 294 | −0.88 | −0.87 | −0.83 | −0.83 | 0.52 | −0.34 | −0.59 | −0.66 |
| 295 | −0.91 | −0.86 | −0.84 | −0.83 | 0.19 | −0.38 | −0.61 | −0.68 |
| 296 | −0.95 | −0.88 | −0.86 | −0.85 | −0.11 | −0.49 | −0.61 | −0.70 |
| 297 | −0.98 | −0.84 | −0.87 | −0.84 | −0.17 | −0.52 | −0.62 | −0.69 |
| 298 | −1.02 | −0.87 | −0.90 | −0.86 | −0.22 | −0.56 | −0.57 | −0.71 |
| 299 | −1.03 | −0.93 | −0.94 | −0.83 | −0.36 | −0.64 | −0.57 | −0.76 |
| 300 | −1.10 | −1.02 | −1.02 | −0.88 | −0.73 | −0.84 | −0.67 | −0.82 |
| 301 | −1.25 | −1.16 | −1.17 | −1.03 | −1.09 | −1.08 | −0.84 | −0.93 |
| 302 | −1.36 | −1.17 | −1.29 | −1.10 | −1.24 | −1.14 | −0.94 | −0.88 |
| 303 | −1.43 | −1.21 | −1.36 | −1.19 | −1.26 | −1.19 | −1.05 | −0.93 |
| 304 | −1.59 | −1.47 | −1.52 | −1.43 | −1.40 | −1.48 | −1.21 | −1.27 |
| 305 | −1.81 | −1.81 | −1.73 | −1.70 | −1.58 | −1.88 | −1.50 | −1.73 |
| 306 | −2.03 | −2.13 | −1.96 | −2.01 | −1.77 | −2.26 | −1.76 | −2.14 |
| 307 | −2.14 | −2.25 | −2.09 | −2.13 | −1.82 | −2.42 | −1.86 | −2.31 |
| 308 | −2.12 | −2.19 | −2.08 | −2.07 | −1.77 | −2.36 | −1.85 | −2.22 |
| 309 | −2.11 | −2.20 | −2.05 | −2.07 | −1.77 | −2.33 | −1.91 | −2.22 |
| 310 | −2.11 | −2.19 | −2.04 | −2.08 | −1.74 | −2.33 | −1.97 | −2.22 |
| 311 | −2.11 | −2.20 | −2.06 | −2.13 | −1.77 | −2.36 | −2.04 | −2.26 |
| 312 | −2.15 | −2.23 | −2.12 | −2.19 | −1.78 | −2.44 | −2.08 | −2.34 |
| 313 | −2.06 | −2.10 | −2.04 | −2.14 | −1.62 | −2.35 | −1.98 | −2.26 |
| 314 | −1.88 | −1.85 | −1.83 | −2.05 | −1.38 | −2.10 | −1.83 | −2.06 |
| 315 | −1.67 | −1.57 | −1.59 | −1.95 | −1.16 | −1.80 | −1.66 | −1.80 |
| 316 | −1.56 | −1.40 | −1.47 | −1.93 | −1.13 | −1.62 | −1.62 | −1.65 |
| 317 | −1.56 | −1.40 | −1.49 | −1.99 | −1.26 | −1.62 | −1.65 | −1.66 |
| 318 | −1.57 | −1.44 | −1.55 | −1.99 | −1.38 | −1.69 | −1.63 | −1.72 |
| 319 | −1.49 | −1.36 | −1.49 | −1.93 | −1.32 | −1.63 | −1.51 | −1.63 |
| 320 | −1.44 | −1.33 | −1.49 | −1.91 | −1.32 | −1.57 | −1.45 | −1.64 |
| 321 | −1.48 | −1.42 | −1.54 | −1.89 | −1.46 | −1.58 | −1.51 | −1.79 |
| 322 | −1.53 | −1.56 | −1.58 | −1.86 | −1.70 | −1.62 | −1.64 | −1.99 |
| 323 | −1.50 | −1.64 | −1.56 | −1.76 | −1.87 | −1.66 | −1.70 | −2.11 |
| 324 | −1.45 | −1.65 | −1.52 | −1.68 | −1.92 | −1.67 | −1.70 | −2.12 |
| 325 | −1.38 | −1.61 | −1.49 | −1.66 | −1.84 | −1.61 | −1.65 | −2.05 |
| 326 | −1.37 | −1.61 | −1.53 | −1.70 | −1.84 | −1.60 | −1.64 | −2.08 |
| 327 | −1.39 | −1.64 | −1.55 | −1.73 | −1.82 | −1.61 | −1.62 | −2.08 |
| 328 | −1.43 | −1.67 | −1.59 | −1.77 | −1.84 | −1.63 | −1.65 | −2.15 |
| 329 | −1.43 | −1.66 | −1.58 | −1.76 | −1.87 | −1.64 | −1.67 | −2.13 |

[1374] Analysis was then conducted of NS1 of the same set of flaviviruses in order to compare predicted B cell linear epitopes to the predicted B cell linear epitopes in the proteins of the human proteome which have a function related to cardiovascular function. Human proteins were selected for inclusion in this comparison if they were annotated in UniProt with one of the key words shown in Table 28.

TABLE 28
Cardiovascular key words

acetyl-transferring
alpha-2-antiplasmin
alpha-hemoglobin-stabilizing
angio-associated
angiogenesis
angiogenic
angiogenin
angiomotin
angiomotin-like
angiopoietin-1
angiopoietin-2
angiopoietin-4
angiopoietin-like
angiopoietin-related
angiostatin
angiotensin
angiotensin-converting
angiotensinogen
antigen_chemokine
antithrombin-iii
ceruloplasmin
chemokine
chemokine-like
chemokine-related
chemotactic
chemotaxin
chemotaxin-2
chemotaxis
coagulation
c-reactive
cyclotransferase
cyclotransferase-like
desmoplakin
endoplasmic
endoplasmin
endoplasmin-like
endothelial
endothelin
endothelin-1
endothelin-2
endothelin-3
endothelin-converting
envoplakin
envoplakin-like
epiplakin
erythroblast
erythrocyte
erythroid
erythropoietic
erythropoietin
ferredoxin
ferredoxin-fold
ferric-chelate
ferritin
ferrochelatase
fibrillarin
fibrillarin-like
fibrillary
fibrillin-1
fibrillin-2
fibrillin-3
fibrinogen
fibrinogen-like
gamma-glutamylcyclotransferase
hematological
hematopoietic
hematopoietically-expressed
heme
heme-binding
hemochromatosis
hemofiltrate
hemogen
hemoglobin
hemojuvelin
hemopexin
lactotransferrin
lipoma-preferred
lvv-hemorphin-7
melanotransferrin
microfibril-associated
microfibrillar-associated
mitoferrin-1
mitoferrin-2
neuferricin
nucleoplasmin-2
nucleoplasmin-3
periplakin
plakoglobin
plakophilin-1
plakophilin-2
plakophilin-3
plakophilin-4
plasminogen
plasminogen-like
platelet
platelet-activating
platelet-derived
prothrombin
protoheme
sarcoplasmic_endoplasmic
serotransferrin
thrombomodulin
thrombopoietin
thrombospondin
thrombospondin-1
thrombospondin-2
thrombospondin-3
thrombospondin-4
thrombospondin-type
thromboxane
thromboxane-a
transferrin
uroplakin-1a
uroplakin-1b
uroplakin-2
uroplakin-3a
uroplakin-3b
uroplakin-3b-like
vascular
vasculin
vasculin-like
vasoactive
vasodilator-stimulated
vasohibin-1
vasohibin-2
vasopressin
vasopressin-induced
vasopressin-neurophysin
vasorin
vwf
vwfa
willebrand
williams-beuren

[1375] Peptide pentamer motifs were identified in flaviviruses which matched pentamer motifs in the cardiovascular protein set, where in both cases the pentamer occurred in a predicted linear B cell epitope. The resulting list was manually curated to exclude proteins which contained terms such as “domain containing” and to identify the proteins actually verified as related to or expressed in blood coagulation, platelets, endothelial cells and erythrocytes.

[1376] Accession numbers of viruses used in identifying these were as shown in Table 29. Additional strains/isolates of all were used to evaluate conservation. Table 30 shows peptides found in dengue, Zika, and Usutu virus NS1 which have mimics in the human cardiovascular set proteins and which fulfill the B cell epitope criteria.

TABLE 29
Accession numbers of viruses analyzed

| | | Polyprotein | Polyprotein | Nucleotide | DBSource |
|---|---|---|---|---|---|
| Flavivirus | | gi | accession | gi | accession |
| Zika | Brazil SPH2015 | 969945757 | ALU33341.1 | 969945756 | KU321639.1 |
| Zika | Senegal ArD158084 | 592746966 | AHL43504.1 | 592746965 | KF383119.1 |
| Dengue 1 | Nauru/West Pac/1974 | 1854039 | AAB70695.1 | 1854038 | U88536.1 |
| Dengue 1 | Brazil 12898/BR-PE/10 | 511782627 | AGN94866.1 | 5117826276 | JX669462.1 |
| Dengue 2 | Thailand/16681/84 | 323473 | AAA73185.1 | 323472 | M84727.1 |
| Dengue 2 | Brazil 9479/BR-PE/10 | 511782661 | AGN94883.1 | 511782660 | JX669479.1 |
| Dengue 3 | Philippines 1956/H87 | 961377532 | ALS05358.1 | 961377531 | KU050695.1 |
| Dengue 3 | Brazil 2009 | 389565793 | AFK83755.1 | 389565792 | JF808120.1 |
| | D3BR/AL95/2009 | | | | |
| Dengue 4 | Thailand/0476/1997 | 53653743 | AAU89375.1 | 53653742 | AY618988.1 |
| Dengue 4 | Brazil DENV-4/BEL83791 | 418715828 | AFX65871.1 | 418715827 | JQ513335.1 |
| Yellow | Live Attenuated | 564014615 | AHB63684.1 | 564014614 | KF769015.1 |
| fever | Yellow Fever Vaccine | | | | |
| | 17D-204 | | | | |
| Yellow | Peru 2007 “case #2” | 256274854 | ACU68590.1 | 256274853 | GQ379163.1 |
| fever | | | | | |
| West Nile | West Nile Virus | 90025138 | ABD85073.1 | 90025137 | DQ431702.1 |
| | 04-216CO | | | | |
| Japanese | JEV SA-14 | 331332 | AAA46248.1 | 331331 | M55506.1 |
| encephalitis | | | | | |
| Tick-borne | TBEV Neudoerfl | 975238 | AAA86870.1 | 975237 | U27495.1 |
| encephalitis | | | | | |
| Usutu | Usutu virus strain Italia | 339831600 | AEK21245.1 | 339831599 | JF266698 |
| | 2009 | | | | |

TABLE 30
Epitope mimics in NS1 proteins

| | | Virus B cell | Proteome B cell | query | |
|---|---|---|---|---|---|
| Virus | Human protein annotation (short) | probability## | probability## | penta | SEQ |
| DEN1 | A disintegrin and metalloproteinase | −1.12 | −0.23 | SLRTT | SEQ 1106 |
| | with thrombospondin motifs 13 | | | | |
| | ADAMTS13 | | | | |
| DEN2 | A disintegrin and metalloproteinase | −1.45 | −0.23 | SLRTT | SEQ 1106 |
| | with thrombospondin motifs 13 | | | | |
| | ADAMTS13 | | | | |
| DEN3 | A disintegrin and metalloproteinase | −1.19 | −0.23 | SLRTT | SEQ 1106 |
| | with thrombospondin motifs 13 | | | | |
| | ADAMTS13 | | | | |
| DEN4 | A disintegrin and metalloproteinase | −1.34 | −0.23 | SLRTT | SEQ 1106 |
| | with thrombospondin motifs 13 | | | | |
| | ADAMTS13 | | | | |
| DEN3 | Coagulation factor V | −0.26 | −1.01 | ASRAW | SEQ 1107 |
| DEN3 | Coagulation factor VIII | −0.72 | −0.25 | IDGPS | SEQ 1108 |
| DEN4 | Coagulation factor VIII | −0.50 | −0.57 | KGKRA | SEQ 1109 |
| DEN4 | Plasminogen | −1.09 | −0.21 | IFTPE | SEQ 1110 |
| DEN1 | Plasminogen | −0.94 | −1.03 | TTVTG | SEQ 1111 |
| DEN3 | Platelet glycoprotein Ib beta chain | −0.84 | −1.34 | SLAGP | SEQ 1112 |
| ZIKV | Platelet glycoprotein Ib beta chain | −0.79 | −1.34 | SLAGP | SEQ 1118 |
| DEN3 | Vascular endothelial growth factor A | −0.62 | −1.19 | SASRA | SEQ 1113 |
| ZIKV | Vascular endothelial growth factor B | −1.51 | −1.64 | PDSPR | SEQ 1114 |
| DEN2 | Vascular endothelial growth factor | −0.67 | −0.80 | AGKRS | SEQ 1115 |
| | receptor 1 | | | | |
| DEN3 | Vascular endothelial growth factor | −0.58 | −1.06 | LEQGK | SEQ 1116 |
| | receptor 1 | | | | |
| DEN4 | Vascular endothelial growth factor | −0.52 | −0.43 | KNSTF | SEQ 1117 |
| | receptor 2 | | | | |
| ZIKV | von Willebrand factor | −0.53 | −0.97 | EECPG | SEQ 1119 |
| ZIKV | von Willebrand factor | −0.86 | −0.15 | EETCG | SEQ 1120 |
| ZIKV | von Willebrand factor | −0.64 | −0.46 | VEETC | SEQ 1121 |
| USUV | Platelet endothelial aggregation | −0.93 | −0.98 | SSGRL | SEQ 1122 |
| | receptor 1 | | | | |
| USUV | Platelet glycoprotein Ib beta chain | −1.01 | −1.72 | LAGPR | SEQ 1123 |

##B cell probabilities are shown in inverse standard deviation units. More negative scores are more likely B cell epitopes in the corresponding protein.

[1377] Some of these mimics may vary depending on the strain of dengue virus, and it will be clear to those skilled in the art that adjustments may be needed on a geographic basis or over time to adapt to changes in mimics which may affect clinical outcome. However, in particular it was noted that all dengue viruses contained a conserved motif SLRTT located in the stable C terminal loop of NS1 between two cysteine bonds [61] at positions 290-311 of the NS1 protein which corresponds to a motif in the C terminal region of ADAMTS13. ADAMTS13 is expressed in endothelial cells and is essential to cleavage to von Willebrand factor. A deficiency of ADAMTS13 is associated with accumulation of multimers of von Willebrand factor, intravascular platelet aggregation, and thrombocytopenia, both congenital and acquired [70, 71]. ADAMTS is expressed in endothelial cells. Other motifs were found in coagulation factors V and VIII, von Willebrand factor and in platelet glycoprotein 1B beta which is also associated with acquired autoimmune thrombocytopenia [72] and is expressed in both platelets and endothelial cells. Notably these epitope mimic motifs for cardiovascular function proteins are not present in West Nile virus.

[1378] Development of transient autoimmunity to these motifs may arise on initial dengue infection but be exacerbated on re-exposure to a further dengue serotype, potentially further boosted by antibody dependent enhancement, thereby contributing to hemorrhagic signs characteristic of dengue hemorrhagic fever. It would be beneficial to remove such epitopes in a vaccine containing NS1 to preclude sensitization to an anamnestic autoimmune response on exposure to wildtype virus of any of the dengue serotypes.

[1379] NS1 Vaccine Constructs with Mimics Removed

[1380] Vaccines may be designed to elicit an immune response to other epitopes but avoid an immune response to epitopes which may elicit an autoimmune response. Examples of such constructs are shown below, however it should be appreciated that these are examples which are not limiting. Vaccines may comprise synthetic polypeptides alone or as fusions to an immunoglobulin or other fusion protein and may be operatively linked by various linkers including an enterokinase linker as shown here. In the case of dengue, we show an illustrative example for dengue serotype 2 native protein construct followed by a mimic, however following a similar logic, analogous NS1 sequences may be made for other serotypes in which the principal mimic epitopes are removed. In reviewing Usutu virus it was also noted that the motif TTTSS generates a high probability mimic matching human myeloid differentiation factor and RITTS matching Synaptopodin 2 (Table 31) these were also removed. The mutant sequences were reviewed to ensure that no new adverse mimics were created.

TABLE 31
Neurologic function mimics in Usutu NS1

| | | | | | |
|---|---|---|---|---|---|
| USUV | Synaptopodin 2 | −1.88 | −0.5 | RTTTS | SEQ 1124 |
| USUV | Myeloid differentiation | −1.82 | −2.14 | TTTSS | SEQ 1125 |
| | factor | | | | |

[1381] Seq.1126. DEN2_NS1 SA, Nucleotide Sequence

[1382] 7-81 Signal peptide

[1383] 82-1134 DEN2-NS11 from POLG DEN26

[1384] Seq.1127. DEN2_NS1 SA, Amino Acid Sequence

[1385] 3-27 Signal peptide

[1386] 28-378 DEN2-NS1 from POLG DEN26

[1387] Seq.1128. ZIKV-NS1 SA, Nucleotide Sequence

[1388] 7-78 Signal peptide

[1389] 79-1134 ZIKV-NS1 from SPH2015

[1390] Seq.1129. ZIKV-NS1 SA, Amino Acid Sequence

[1391] 3-26 Signal peptide

[1392] 27-378 ZIKV-NS1 from SPH2015

[1393] Seq.1130. Usutu-NS1 SA, Nucleotide Sequence

[1394] 7-78 Signal peptide

[1395] 79-1134 Usutu-NS1

[1396] Seq.1131. Usutu-NS1 SA, Amino Acid Sequence

[1397] 3-26 Signal peptide

[1398] 27-378 Usutu-NS1

[1399] Seq.1132. DEN2_NS1-EKL-hG1(CH2-CH3), Nucleotide Sequence

[1400] 1-63 Signal peptide

[1401] 70-1131 DEN2 NS1 from POLG DEN26

[1402] 1132-1155 Enterokinase Linker

[1403] 1162-1857 hG1(CH2-CH3) Constant region

[1404] Seq.1133. DEN2_NS1-EKL-hG1(CH2-CH3), Amino Acid Sequence

[1405] 1-21 Signal peptide

[1406] 24-377 DEN2 NS1 from POLG DEN26

[1407] 378-385 Enterokinase Linker

[1408] 388-619 hG1(CH2-CH3) Constant region

[1409] Seq.1134. ZIKV_NS1-EKL-hG1(CH2-CH3), Nucleotide Sequence

[1410] 1-63 Signal peptide

[1411] 70-1131 ZIKV_NS1 from SPH2015

[1412] 1132-1155 Enterokinase Linker

[1413] 1162-1857 hG1(CH2-CH3) Constant region

[1414] Seq.1135. ZIKV_NS1-EKL-hG1(CH2-CH3), Amino Acid Sequence

[1415] 1-21 Signal peptide

[1416] 24-377ZIKV NS1 from SPH2015

[1417] 378-385 Enterokinase Linker

[1418] 388-619 hG1(CH2-CH3) Constant region

[1419] Seq.1136. Usutu_NS1-EKL-hG1(CH2-CH3), Nucleotide Sequence

[1420] 1-63 Signal peptide

[1421] 70-1131 Usutu_NS1

[1422] 1132-1155 Enterokinase Linker

[1423] 1162-1857 hG1(CH2-CH3) Constant region

[1424] Seq.1137. Usutu_NS1-EKL-hG1(CH2-CH3), Amino Acid Sequence

[1425] 1-21 Signal peptide

[1426] 24-377 Usutu_NS1

[1427] 378-385 Enterokinase Linker

[1428] 388-619 hG1(CH2-CH3) Constant region

### Example 17: NS1 Loops for Diagnostics

[1429] The C terminal loop of NS1 proteins of flaviviruses is highly conserved within strains of each virus. In NS1 the peptide sequence lying between cysteines at 290 and 311 is unique to each flavivirus, but highly conserved among strains of that flavivirus. This loop also comprises a strong B cell epitope. In dengue the loop comprises the motif SLRTT which as described above is a mimic for the human protein ADAMTS13. Table 32 shows the alignment for various flaviviruses of interest. By assembling peptides comprising the 290-311 sequence a loop is formed stabilized by the C—C bonds. As seen in Table 32 the loop comprises the sequence CXXRGXXXRXTTXXGRXXXXWC (SEQ ID NO: 1245) in all flavivruses of interest but is unique to each virus of interest. Therefore, an array comprising variations on this generic sequence structure provides a diagnostic array. An array of the 290-311 loops and derivative constructs thereof can thus serve as a differential diagnostic to differentiate antibody responses to the flaviviruses.

[1430] The loop thus formed by a C—C bond may be expressed operably associated as a fusion with an indicator label peptide such as GFP or luciferase or other label peptides. In yet other embodiments an adherent tag or anchor peptide such as a histidine tag or a FLAG tag may be expressed as a fusion with the loop. Said label or anchor peptide may be positioned at the N terminus or the C terminus of the loop peptide. In yet further embodiments the loop may be expressed with both indicator and adherent tags simultaneously.

[1431] The loop peptides may be utilized in an ELISA, a dot blot, a bead attached peptide or in many other serodiagnostic configurations, so that these examples are not considered limiting. Negative control loop peptides are constructed containing a pentamer “scrambled” motif not present in any flavivirus.

TABLE 32
Comparative amino acid distribution on C terminal loop of NS1

| | YF | DEN1 | DEN2 | DEN3 | DEN4 | ZIKV | WNV | JEV | TBEV | SLE | USUV | scramble |
|---|---|---|---|---|---|---|---|---|---|---|---|---|
| 290 | C | C | C | C | C | C | C | C | C | C | C | C |
| 291 | D | G | G | G | D | G | E | S | D | G | G | G |
| 292 | G | N | N | T | H | T | H | K | K | N | K | T |
| 293 | R | R | R | R | R | R | R | R | R | R | R | R |
| 294 | G | G | G | G | G | G | G | G | G | G | G | G |
| 295 | K | P | P | P | P | P | P | P | A | A | P | P |
| 296 | S | S | S | S | S | S | A | S | S | S | S | S |
| 297 | T | L | L | L | L | L | A | V | V | L | I | L |
| 298 | R | R | R | R | R | R | R | R | R | R | R | R |
| 299 | S | T | T | T | T | S | T | T | S | T | T | M |
| 300 | T | T | T | T | T | T | T | T | T | T | T | T |
| 301 | T | T | T | T | T | T | T | T | T | T | T | T |
| 302 | D | V | A | V | A | A | E | D | E | A | S | V |
| 303 | S | T | S | S | S | S | S | S | S | S | S | M |
| 304 | G | G | G | G | G | G | G | G | G | G | G | G |
| 305 | K | K | K | K | K | R | K | K | K | K | R | R |
| 306 | V | I | L | L | L | V | L | L | V | L | L | V |
| 307 | I | I | I | I | V | I | I | I | I | V | V | I |
| 308 | P | H | T | H | T | E | T | T | P | T | T | E |
| 309 | E | E | E | E | Q | E | D | D | E | D | D | E |
| 310 | W | W | W | W | W | W | W | W | W | W | W | W |
| 311 | C | C | C | C | C | C | C | C | C | C | C | C |

[1432] Exemplary sequences are provided below for dengue Zika, Usutu, and West Nile viruses plus a scrambled mimic control. We note that early African Usutu viruses have a sequence CGKRGPSIRTTTNSGRLVTDWC but the 302 N is replaced by a serine in current European sequences and thus this is adopted here for diagnostic purposes.

TABLE 33
Loop sequences from NS1 of
flaviviruses of interest

| | | |
|---|---|---|
| YF | CDGRGKSTRSTTDSGKVIPEWC | SEQ 1138 |
| DEN1 | CGNRGPSLRTTTVTGKIIHEWC | SEQ 1139 |
| DEN2 | CGNRGPSLRTTTASGKLITEWC | SEQ 1140 |
| DEN3 | CGTRGPSLRTTTVSGKLIHEWC | SEQ 1141 |
| DEN4 | CDHRGPSLRTTTASGKLVTQWC | SEQ 1142 |
| ZIKV | CGTRGPSLRSTTASGRVIEEWC | SEQ 1143 |
| WNV | CEHRGPAARTTTESGKLITDWC | SEQ 1144 |
| JEV | CSKRGPSVRTTTDSGKLITDWC | SEQ 1145 |
| TBEV | CDKRGASVRSTTESGKVIPEWC | SEQ 1146 |
| SLE | CGNRGASLRTTTASGKLVTDWC | SEQ 1147 |
| USUV | CGKRGPSIRTTTSSGRLVTDWC | SEQ 1148 |
| Scramble | CGTRGPSLRMTTVMGRVIEEWC | SEQ 1149 |

[1433] Exemplary constructs are provided for expression of some the above “loop” diagnostic sequences as synthetic polypeptides with a label sequence at the C terminal end. Those skilled in the art will understand that the label GFP sequences shown could be replaced by other labels or anchor sequences such as a his tag and similarly will understand how to make similar constructs for the other flaviruses. Further such a skilled artisan will be able to place the label or anchor at the N terminal end of the loop.

[1434] Seq. 1150. ZikVLoop-Link-GFP, Nucleotide Sequence

[1435] 4-69 ZikV Loop Region

[1436] 76-90 Linker

[1437] 91-807 GFP

[1438] Seq.1 151. ZikVLoop-Link-GFP, Amino Acid Sequence

[1439] 2-23 ZikV Loop Region

[1440] 26-30 Linker

[1441] 31-269 GFP

[1442] Seq.1152. ScrambleLoop-Link-GFP, Nucleotide Sequence

[1443] 4-69 Scramble Loop Region

[1444] 76-90 Linker

[1445] 91-807 GFP

[1446] Seq.1153. ScrambleLoop-Link-GFP, Amino Acid Sequence

[1447] 2-23 Scramble Loop Region

[1448] 26-30 Linker

[1449] 31-269 GFP

[1450] Seq.1154. YellowFeverLoop-Link-GFP, Nucleotide Sequence

[1451] 4-69 Yellow Fever Loop Region

[1452] 76-90 Linker

[1453] 91-807 GFP

[1454] Seq. 155. YellowFeverLoop-Link-GFP, Amino Acid Sequence

[1455] 2-23 Yellow Fever Loop Region

[1456] 26-30 Linker

[1457] 31-269 GFP

[1458] Seq.1156. WestNileLoop-Link-GFP, Nucleotide Sequence

[1459] 4-69 West Nile Loop Region

[1460] 76-90 Linker

[1461] 91-807 GFP

[1462] Seq.1157. WestNileLoop-Link-GFP, Amino Acid Sequence

[1463] 2-23 West Nile Loop Region

[1464] 26-30 Linker

[1465] 31-269 GFP

[1466] Seq.1158. Dengue2Loop-Link-GFP, Nucleotide Sequence

[1467] 4-69 Dengue2 Loop Region

[1468] 76-90 Linker

[1469] 91-807 GFP

[1470] Seq.1159. Dengue2Loop-Link-GFP, Amino Acid Sequence

[1471] 2-23 Dengue2 Loop Region

[1472] 26-30 Linker

[1473] 31-269 GFP

[1474] Seq.1160. UsutuLoop-Link-GFP, Nucleotide Sequence

[1475] 4-69 Usutu Loop Region

[1476] 76-90 Linker

[1477] 91-807 GFP

### Example 18: Epitopes in Usutu Virus Structural Proteins

[1478] FIG. 33 shows the predicted epitopes in USUV envelope protein. FIG. 34 shows predicted epitopes in the PrM, FIG. 35 shows the predicted epitopes in Capsid proteins, and FIG. 36 the NS1 protein. These figures are based on recent European isolates, using the Usutu Italian isolate, Accession number JF266698.

[1479] Tables 9-11 shows predicted B cell epitope mimics in these structural proteins of USUV for neurologic proteins, microcephaly related proteins and cardiovascular proteins.

TABLE 34
Neurologic protein mimics in USUV structural proteins

| | | | | B cell epitope | |
|---|---|---|---|---|---|
| USUV protein | | | B cell epitope | probability in | |
| Human protein | | Pentamer | probability in | human | |
| Envelope | SEQ | motif | virus | protein | Uniprot identifier |
| Myelin- | SEQ 1161 | ETEAT | −0.65 | −1.74 | Q5SUK5_HUMAN |
| oligodendrocyte | | | | | |
| glycoprotein | | | | | |
| Synaptotagmin-like | SEQ 1162 | PTTGE | −1.60 | −0.66 | SYTL2_HUMAN |
| protein 2 | | | | | |
| Synaptopodin-2 | SEQ 1163 | KSGVT | −0.77 | −0.41 | SYNP2_HUMAN |
| Neuroendocrine | SEQ 1164 | GKGSI | −0.54 | −0.55 | NEC2_HUMAN |
| convertase 2 | | | | | |
| Putative | SEQ 1165 | GSTSS | −1.41 | −1.49 | NBPF7_HUMAN |
| neuroblastoma | | | | | |
| breakpoint family | | | | | |
| member 7 | | | | | |
| Synaptotagmin-16 | SEQ 1166 | STSSD | −1.75 | −1.78 | SYT16_HUMAN |
| Neurobeachin-like | SEQ 1167 | QLGAS | −1.33 | −0.43 | NBEL2_HUMAN |
| protein 2 | | | | | |
| Ceroid-lipofuscinosis | SEQ 1168 | QLGAS | −1.33 | −0.78 | CLN6_HUMAN |
| neuronal protein 6 | | | | | |
| Synaptogyrin-3 | SEQ 1169 | GASQA | −1.24 | −1.20 | SNG3_HUMAN |
| Synapsin-1 | SEQ 1170 | ASQAG | −1.00 | −0.49 | SYN1_HUMAN |
| Synaptopodin 2-like | SEQ 1171 | SQAGR | −0.78 | −0.47 | A6NCR3_HUMAN |
| protein | | | | | |
| Synaptotagmin-8 | SEQ 1172 | SPASS | −1.42 | −1.15 | F8WBL4_HUMAN |
| Motor neuron and | SEQ 1167 | SPASS | −1.42 | −0.93 | MNX1_HUMAN |
| pancreas homeobox | | | | | |
| protein 1 | | | | | |
| Hematological and | SEQ 1173 | SPASS | −1.42 | −0.71 | HN1_HUMAN |
| neurological | | | | | |
| expressed 1 protein | | | | | |
| Neurobeachin-like | SEQ 1174 | LTSGH | −0.59 | −1.10 | NBEL2_HUMAN |
| protein 2 | | | | | |
| Neurogenic locus | SEQ 1175 | LKGTT | −0.73 | −0.40 | NOTC1_HUMAN |
| notch homolog | | | | | |
| protein 1 | | | | | |
| Synaptosomal- | SEQ 1176 | VASSE | −1.21 | −0.41 | SNP29_HUMAN |
| associated protein 29 | | | | | |
| Myelin transcription | SEQ 1177 | ASSEA | −1.32 | −0.58 | MYT1_HUMAN |
| factor 1 | | | | | |
| Calcineurin subunit B | SEQ 1178 | GDKQI | −0.83 | −0.91 | H7BYZ3_HUMAN |
| type 1 | | | | | |
| CMP-N- | SEQ 1179 | AGSSI | −1.28 | −0.63 | SIA8D_HUMAN |
| acetylneuraminate- | | | | | |
| poly-alpha-2 | | | | | |
| PrM | SEQ 1180 | | | | |
| Neurobeachin-like | SEQ 1181 | STKAS | 0.83 | −1.50 | NBEL1_HUMAN |
| protein 1 | | | | | |

TABLE 35
Cardiovascular protein mimics in USUV structural proteins

| USUV protein | | | B cell epitope | B cell epitope | |
|---|---|---|---|---|---|
| Human protein | | | probability in | probability in | |
| Envelope | SEQ | Pentamer motif | virus | human protein | Uniprot identifier |
| Brain-specific | SEQ 1182 | AKDKP | −0.76 | −1.85 | A2A3C1_HUMAN |
| angiogenesis | | | | | |
| inhibitor 2 | | | | | |
| Lymphatic vessel | SEQ 1183 | RAEDT | −1.15 | −0.43 | F2Z296_HUMAN |
| endothelial | | | | | |
| hyaluronic acid | | | | | |
| receptor 1 | | | | | |
| Vasopressin V2 | SEQ 1184 | SGVTD | −1.01 | −0.60 | V2R_HUMAN |
| receptor | | | | | |
| Uroplakin-3b | SEQ 1185 | GSIDT | −0.64 | −0.89 | A6NHH5_HUMAN |
| Plakophilin-4 | SEQ 1186 | GSTSS | −1.41 | −1.69 | PKP4_HUMAN |
| Erythroid | SEQ 1187 | STSSD | −1.75 | −2.00 | EDRF1_HUMAN |
| differentiation- | | | | | |
| related factor 1 | | | | | |
| Vascular | SEQ 1188 | SSQLG | −1.12 | −0.65 | VEGFB_HUMAN |
| endothelial growth | | | | | |
| factor B | | | | | |
| Serotransferrin | SEQ 1189 | LGASQ | −1.34 | −1.17 | F8WC57_HUMAN |
| Endothelial PAS | SEQ 1190 | TPNSP | −1.15 | −1.81 | EPAS1_HUMAN |
| domain- | | | | | |
| containing protein 1 | | | | | |
| C-C motif | SEQ 1191 | WTSPA | −1.17 | −0.57 | CCL19_HUMAN |
| chemokine 19 | | | | | |
| Endothelial | SEQ 1192 | SPASS | −1.42 | −2.00 | GATA2_HUMAN |
| transcription | | | | | |
| factor GATA-2 | | | | | |
| Hematological | SEQ 1193 | SPASS | −1.42 | −0.71 | HN1_HUMAN |
| and neurological | | | | | |
| expressed 1 | | | | | |
| protein | | | | | |
| C-C motif | SEQ 1194 | ALGSQ | −0.76 | −0.53 | CCL23_HUMAN |
| chemokine 23 | | | | | |
| Erythrocyte | SEQ 1195 | QEGAL | −0.88 | −0.70 | EPB42_HUMAN |
| membrane protein | | | | | |
| band 4_2 | | | | | |
| Desmoplakin | SEQ 1196 | TGSDG | −1.52 | −1.70 | DESP_HUMAN |
| Endothelial cell- | SEQ 1197 | SSEAN | −1.25 | −0.50 | ECSCR_HUMAN |
| specific | | | | | |
| chemotaxis | | | | | |
| regulator | | | | | |

TABLE 36
Microcephaly related protein mimics in USUV structural proteins

| | | | | B cell | |
|---|---|---|---|---|---|
| | | | B cell | epitope | |
| USUV protein | | | epitope | probability | |
| Human protein | | Pentamer | probability | in human | |
| Envelope | SEQ | motif | in virus | protein | Uniprot identifier |
| CCDC19 protein | SEQ 1198 | METEA | −0.54 | −1.06 | Q05BA3_HUMAN |
| Centrosomal protein of 78 kDa | SEQ 1199 | STVSN | −0.62 | −0.87 | A8MST6_HUMAN |
| CDK5 and ABL1 enzyme | SEQ 1200 | KSGVT | −0.77 | −0.29 | CABL2_HUMAN |
| substrate 2 | | | | | |
| Centrosomal protein | SEQ 1201 | STSSD | −1.75 | −0.32 | KIZ_HUMAN |
| kizuna | | | | | |
| Centromere protein V | SEQ 1202 | ASQAG | −1.00 | −1.20 | CENPV_HUMAN |
| Microcephalin | SEQ 1203 | SPASS | −1.42 | −0.94 | MCPH1_HUMAN |
| CDK5 regulatory subunit- | SEQ 1204 | QEGAL | −0.88 | −0.73 | CK5P2_HUMAN |
| associated protein 2 | | | | | |
| Centromere protein O | SEQ 1205 | QEGAL | −0.88 | −1.57 | CENPO_HUMAN |
| Microcephalin | SEQ 1206 | SGSVK | −0.28 | −0.60 | MCPH1_HUMAN |
| Cdc42 effector protein 3 | SEQ 1207 | LSDLT | −0.51 | −0.37 | BORG2_HUMAN |
| Protein CASC5 | SEQ 1208 | SSEAN | −1.25 | −1.34 | CASC5_HUMAN |
| Centromere_kinetochore | SEQ 1209 | GAQRL | −0.53 | −0.84 | ZW10_HUMAN |
| protein zw10 homolog | | | | | |
| Centrosomal protein of 192 kDa | SEQ 1210 | ALGDT | −0.39 | −0.33 | E9PF99_HUMAN |

[1480] In particular the following mimics were considered potentially adverse in a vaccine and constructs are provided for sequences in which these mimics have been substituted by other motifs: ETEAT, STSSD, SSQLG, SPASS, SGSVK, ASSEA. The mutant sequences were reviewed to ensure that no new adverse mimics were created.

[1481] Seq.1211. E_KJ438705env SA, Nucleotide Sequence

[1482] 1-63 Signal peptide

[1483] 70-1569 E_KJ438705 envelope protein

[1484] Seq.1212. E_KJ438705env SA, Amino Acid Sequence

[1485] 1-21 Signal peptide

[1486] 24-523 E_KJ438705 envelope protein

[1487] Seq.1213. E_KJ438705-EKL-hG1(CH2-CH3), Nucleotide Sequence

[1488] 1-63 Signal peptide

[1489] 70-1569 E_KJ438705 envelope protein

[1490] 1570-1593 Enterokinase Linker

[1491] 1600-2295 hG1(CH2-CH3) Constant region

[1492] Seq.1214. E_KJ438705-EKL-hG1(CH2-CH3), Amino Acid Sequence

[1493] 1-21 Signal peptide

[1494] 24-523 E_KJ438705 envelope protein

[1495] 524-531 Enterokinase Linker

[1496] 534-765 hG1(CH2-CH3) Constant region

[1497] Seq.1215. MutantUSUV_Env SA, Nucleotide Sequence

[1498] 1-63 Signal peptide

[1499] 70-1569 MutantUSUV envelope protein

[1500] Seq.1216. MutantUSUV_Env SA, Amino Acid Sequence

[1501] 1-21 Signal peptide

[1502] 24-523 MutantUSUV envelope protein

[1503] Seq.1217. MutantUSUV-EKL-hG1(CH2-CH3), Nucleotide Sequence

[1504] 1-63 Signal peptide

[1505] 70-1569 MutantUSUV envelope protein

[1506] 1570-1593 Enterokinase Linker

[1507] 1600-2295 hG1(CH2-CH3) Constant region

[1508] Seq.1218. MutantUSUV-EKL-hG1(CH2-CH3), Amino Acid Sequence

[1509] 1-21 Signal peptide

[1510] 24-523 MutantUSUV envelope protein

[1511] 524-531 Enterokinase Linker

[1512] 534-765 hG1(CH2-CH3) Constant region

[1513] Diagnostic Applications to Differentiate USUV

[1514] Epitope pentamers were selected from USUV which are conserved and which are distinct from other co-endemic flaviviruses. These were evaluated against other flaviviruses and a subset of pentamers identified which can be included in a diagnostic peptide array to distinguish Usutu virus.

[1515] From the envelope the following peptides were selected from USUV as shown in Table 37

TABLE 37
Peptides from USUV envelope protein
for diagnostic arrays

| | | B Cell Epitope | Position in | |
|---|---|---|---|---|
| SEQ | Pentamer | probability | USUV ENV | Flanking regions |
| SEQ 1219 | PTTGE | −1.60 | 77 | TGEAHNPKRAEDTYV |
| SEQ 1220 | NPKRA | −1.76 | 84 | KRAEDTYVCKSGVTD |
| SEQ 1221 | SSDTH | −2.09 | 150 | DTHGNYSSQLGASQA |
| SEQ 1222 | HGNYS | −1.35 | 154 | NYSSQLGASQAGRFT |
| SEQ 1223 | PNSPA | −1.19 | 173 | SPAITVKMGDYGEIS |
| SEQ 1224 | PRNGL | −1.13 | 194 | NGLNTEAYYIMSVGT |
| SEQ 1225 | TSPAS | −1.27 | 228 | PASSNWRNREILLEF |
| SEQ 1226 | PASSN | −1.52 | 230 | SSNWRNREILLEFEE |
| SEQ 1227 | PHATK | −1.17 | 247 | ATKQSVVALGSQEGA |
| SEQ 1228 | FAKNP | −1.04 | 312 | KNPADTGHGTVVLEL |
| SEQ 1229 | TGSDG | −1.52 | 331 | SDGPCKIPISIVASL |
| SEQ 1230 | ASSEA | −1.32 | 364 | SEANAKVLVEMEPPF |

[1516] These pentamers were determined to be highly conserved in 68 USUV envelope proteins examined. Cross reactivity was checked against a panel of other flaviviruses and the E2 protein of chikungunya. Table 38 shows that there is little cross reactivity except in those peptides designated as “PanFlavi”. Furthermore peptides previously selected as distinguishing epitopes of the other flaviviruses (see, e.g., copending U.S. Prov. Applications 62/286,779; 62/290,616; 62/292,964; 62/306,264; 62/321,375; and 62/350,881; each of which is incorporated herein by reference in its entirety) were shown to be absent from the 68 USUV envelope proteins examined.

TABLE 38

| | | B cell | | | | | | | | | | | | |
|---|---|---|---|---|---|---|---|---|---|---|---|---|---|---|
| | | epitope | Position | | | Den | | | | | | | | |
| Virus | Peptide# | probaility | in ENV | Flanking regions | Pentamer | N1 | Den2 | Den3 | Den4 | YF | WNV | ZILV | Chik | USUV |
| DEN1 | 1 | −1.04 | 51 | ELLKTEVTNPAVLRK | EVTNP | 186 | 0 | 0 | 0 | 0 | 0 | 0 | 0 | 0 |
| DEN1 | 2 | −1.84 | 168 | IATITPQAPTSEIQL | PQAPT | 187 | 0 | 0 | 0 | 0 | 0 | 0 | 0 | 0 |
| DEN1 | 3 | −2.09 | 227 | WTSGASTSQETWNRQ | STSQE | 188 | 0 | 0 | 0 | 0 | 0 | 0 | 0 | 0 |
| DEN1 | 4 | −1.57 | 272 | TGATEIQTSGTTTIF | IQTSG | 192 | 0 | 3 | 0 | 0 | 0 | 0 | 0 | 0 |
| DEN1 | 5 | −1.55 | 329 | VQVKYEGTDAPCKTP | EGTDA | 190 | 0 | 0 | 0 | 0 | 0 | 0 | 0 | 0 |
| DEN1 | 6 | −1.77 | 344 | FLTQDEKGVTQNGRL | EKGVT | 185 | 0 | 0 | 0 | 0 | 0 | 0 | 0 | 0 |
| DEN1 | 7 | −0.99 | 361 | ANPIVTDKEKPVNIE | TDKEK | 191 | 0 | 0 | 0 | 0 | 0 | 0 | 0 | 0 |
| DEN1 | 8 | −1.55 | 371 | PVNIETEPPFGESYI | TEPPF | 191 | 0 | 0 | 0 | 0 | 0 | 0 | 0 | 0 |
| DEN2 | 1 | −1.65 | 226 | WLPGADTQGSNWIQK | DTQGS | 0 | 215 | 0 | 0 | 0 | 0 | 0 | 0 | 0 |
| DEN2 | 2 | −1.13 | 228 | PGADTQGSNWIQKET | QGSNW | 0 | 215 | 0 | 0 | 0 | 0 | 0 | 0 | 0 |
| DEN2 | 3 | −1.44 | 244 | VTFKNPHAKKQDVVV | PHAKK | 0 | 215 | 0 | 0 | 0 | 0 | 0 | 0 | 0 |
| DEN2 | 4 | −1.74 | 328 | IRVQYEGDGSPCKIP | EGDGS | 0 | 215 | 0 | 0 | 0 | 0 | 0 | 0 | 0 |
| DEN2 | 5 | −1.27 | 330 | VQYEGDGSPCKIPFE | DGSPC | 0 | 215 | 0 | 0 | 0 | 0 | 0 | 0 | 0 |
| DEN2 | 6 | −1.28 | 362 | PIVTEKDSPVNIEAE | KDSPV | 0 | 212 | 0 | 0 | 0 | 0 | 0 | 0 | 0 |
| DEN2 | 7 | −1.53 | 370 | PVNIEAEPPFGDSYI | AEPPF | 1 | 215 | 208 | 0 | 0 | 0 | 0 | 0 | 0 |
| DEN2 | 8 | −1.14 | 372 | NIEAEPPFGDSYIIV | PPFGD | 0 | 215 | 0 | 433 | 48 | 0 | 0 | 0 | 66 |
| DEN3 | 1 | −1.49 | 154 | QHQVGNETQGVTAEI | NETQG | 0 | 0 | 206 | 0 | 0 | 0 | 0 | 0 | 0 |
| DEN3 | 2 | −2.03 | 224 | WTSGATTETPTWNRK | TTETP | 0 | 0 | 205 | 0 | 0 | 0 | 0 | 0 | 0 |
| DEN3 | 3 | −1.63 | 269 | TGATEIQNSGGTSIF | IQNSG | 0 | 0 | 203 | 0 | 0 | 0 | 0 | 0 | 0 |
| DEN3 | 4 | −1.63 | 311 | VLKKEVSETQHGTIL | VSETQ | 0 | 0 | 208 | 0 | 0 | 0 | 0 | 0 | 0 |
| DEN3 | 5 | −1.24 | 327 | KVEYKGEDAPCKIPF | GEDAP | 0 | 0 | 145 | 0 | 0 | 0 | 0 | 0 | 0 |
| DEN3 | 6 | −1.02 | 327 | KVEYKGEDVPCKIFF | GEDVP | 0 | 0 | 62 | 0 | 0 | 0 | 0 | 0 | 0 |
| DEN3 | 7 | −1.31 | 336 | PCKIPFSTEDGQGKA | FSTED | 0 | 0 | 208 | 0 | 0 | 0 | 0 | 0 | 0 |
| DEN3 | 8 | −1.17 | 360 | PVVTKKEEPVNIEAE | KEEPV | 0 | 0 | 191 | 0 | 0 | 0 | 0 | 0 | 0 |
| DEN3 | 9 | −1.57 | 369 | VNIEAEPPFGESNIV | EPPFG | 192 | 215 | 208 | 433 | 0 | 0 | 0 | 0 | 66 |
| DEN4 | 1 | −1.18 | 48 | DFELTKTTAKEVALL | KTTAK | 0 | 0 | 0 | 431 | 0 | 0 | 0 | 0 | 0 |
| DEN4 | 2 | −1.68 | 155 | HAVGNDTSNHGVTAT | DTSNH | 0 | 0 | 0 | 430 | 0 | 0 | 0 | 0 | 0 |
| DEN4 | 3 | −1.59 | 166 | VTATITPRSPSVEVE | TPRSP | 0 | 0 | 0 | 433 | 0 | 0 | 0 | 0 | 0 |
| DEN4 | 4 | −1.62 | 272 | GATEVDSGDGNHMFA | DSGDG | 0 | 0 | 0 | 424 | 0 | 0 | 0 | 0 | 0 |
| DEN4 | 5 | −1.29 | 315 | DKEMAETQHGTTVVK | ETQHG | 192 | 215 | 208 | 433 | 5 | 0 | 0 | 0 | 0 |
| DEN4 | 6 | −1.44 | 328 | VKVKYEGAGAPCKVP | EGAGA | 0 | 0 | 0 | 431 | 0 | 0 | 0 | 0 | 0 |
| DEN4 | 7 | −1.06 | 358 | ISSIPLAENTNSVTN | LAENT | 0 | 0 | 0 | 431 | 0 | 0 | 0 | 0 | 0 |
| DEN4 | 8 | −1.05 | 362 | PLAENTNSVTNIELE | TNSVT | 0 | 0 | 0 | 423 | 0 | 0 | 0 | 0 | 0 |
| PAN | 1 | | 313 | | ETQHG | 192 | 215 | 208 | 433 | 0 | 0 | 0 | 0 | 0 |
| DEN | | | | | | | | | | | | | | |
| PAN | 2 | | 369 | | EPPFG | 192 | 215 | 208 | 433 | 0 | 51 | 0 | 0 | 67 |
| DEN | | | | | | | | | | | | | | |
| PAN | 3 | | 99 | | DRGWG | 192 | 215 | 208 | 433 | 48 | 50 | 41 | 0 | 66 |
| DEN | | | | | | | | | | | | | | |
| PAN | 4 | | 185 | | SPRTG | 192 | 215 | 207 | 0 | 0 | 0 | 0 | 0 | 0 |
| DEN | | | | | | | | | | | | | | |
| PAN | 5 | | 404 | | TARGA | 192 | 0 | 207 | 0 | 0 | 0 | 0 | 0 | 0 |
| DEN | | | | | | | | | | | | | | |
| PAN | 6 | | 394 | | GSSIG | 192 | 214 | 208 | 433 | 48 | 51 | 0 | 0 | 68 |
| DEN | | | | | | | | | | | | | | |
| PAN | 7 | | 74 | | RCPTQ | 192 | 215 | 208 | 433 | 0 | 0 | 41 | 0 | 0 |
| DEN | | | | | | | | | | | | | | |
| PAN | 8 | | 370 | | PPFGD | 0 | 215 | 0 | 433 | 48 | 51 | 41 | 0 | 66 |
| DEN | | | | | | | | | | | | | | |
| YF | 1 | −1.04 | 52 | ETVAIDRPAEVRKVC | DRPAE | 0 | 0 | 0 | 0 | 4 | 0 | 0 | 0 | |
| YF | 2 | −1.25 | 150 | HVGAKQENWNTDIKT | QENWN | 0 | 0 | 0 | 0 | 39 | 0 | 0 | 0 | |
| YF | 3 | −1.22 | 165 | LKFDALSGSQEVEFI | LSGSQ | 0 | 0 | 0 | 0 | 48 | 0 | 0 | 0 | |
| YF | 4 | −1.08 | 218 | DLTLPWQSGSGGVWR | WQSGS | 0 | 0 | 0 | 0 | 48 | 0 | 0 | 0 | |
| YF | 5 | −1.50 | 250 | VLALGNQEGSLKTAL | NQEGS | 0 | 0 | 0 | 0 | 44 | 0 | 0 | 0 | |
| YF | 6 | −1.73 | 267 | AMRVTKDTNDNNLYK | KDTND | 0 | 0 | 0 | 0 | 25 | 0 | 0 | 0 | |
| YF | 7 | −2.21 | 311 | FFVKNPTDTGHGTVV | PTDTG | 0 | 0 | 0 | 0 | 47 | 0 | 0 | 0 | |
| YF | 8 | −1.30 | 358 | VNPIASTNDDEVLIE | STNDD | 0 | 0 | 0 | 0 | 46 | 0 | 0 | 0 | |
| YF | 9 | −1.61 | 356 | VTVNPIASTNDDEVL | IASTN | 0 | 0 | 0 | 0 | 48 | 0 | 0 | 0 | |
| YF | 10 | −1.03 | 369 | VLIEVNPPFGDSYII | NPPFG | 0 | 0 | 0 | 0 | 48 | 0 | 0 | 0 | |
| WNV | 1 | −1.52 | 38 | TIMSKDKPTIDVKMM | DKPTI | 0 | 0 | 0 | 0 | 0 | 49 | 0 | 0 | 0 |
| WNV | 2 | −1.11 | 148 | FVHGPTTVESHGKIG | TTVES | 0 | 0 | 0 | 0 | 0 | 51 | 0 | 0 | 0 |
| WNV | 3 | −1.21 | 188 | VTVDCEPRSGIDTSA | EPRSG | 0 | 0 | 0 | 433 | 0 | 51 | 0 | 0 | 0 |
| WNV | 4 | −1.07 | 253 | SVVALGSQEGALHQA | GSQEG | 192 | 215 | 208 | 432 | 0 | 51 | 40 | 0 | 0 |
| WNV | 5 | −0.81 | 295 | EKLQLKGTTYGVCSK | KGTTY | 0 | 0 | 0 | 0 | 0 | 51 | 0 | 0 | 0 |
| WNV | 6 | −1.86 | 312 | KFARTPADTGHGTVV | PADTG | 0 | 0 | 0 | 0 | 0 | 51 | 0 | 0 | 0 |
| WNV | 7 | −1.50 | 327 | LELQYTGTDGPCKVP | TGTDG | 0 | 0 | 0 | 0 | 0 | 49 | 0 | 0 | 0 |
| WNV | 8 | −0.90 | 385 | YIVVGRGEQQINHHW | RGEQQ | 0 | 0 | 0 | 0 | 0 | 51 | 0 | 0 | 0 |
| ZIKV | 1 | −0.62 | 16 | DFVEGMSGGTWVDIV | MSGGT | 0 | 0 | 0 | 0 | 0 | 0 | 41 | 0 | 0 |
| ZIKV | 2 | −1.21 | 38 | TVMAQDKPTVDIELV | DKPTV | 0 | 0 | 0 | 0 | 0 | 0 | 41 | 0 | 0 |
| ZIKV | 3 | −1.41 | 86 | AYLDKQSDTQYVCKR | QSDTQ | 0 | 0 | 0 | 0 | 0 | 0 | 41 | 0 | 0 |
| ZIKV | 4 | −1.37 | 128 | SKKMTGKSIQPENLE | GKSIQ | 0 | 0 | 0 | 0 | 0 | 0 | 41 | 0 | 0 |
| ZIKV | 5 | −0.84 | 145 | IMLSVHGSQHSGMIV | HGSQH | 0 | 0 | 0 | 0 | 0 | 0 | 41 | 0 | 0 |
| ZIKV | 6 | −2.20 | 159 | VNDTGHETDENRAKV | HETDE | 0 | 0 | 0 | 0 | 0 | 0 | 41 | 0 | 0 |
| ZIKV | 7 | −2.01 | 172 | KVEITPNSPRAEATL | PNSPR | 0 | 0 | 0 | 0 | 0 | 0 | 41 | 0 | 0 |
| ZIKV | 8 | −1.70 | 175 | ITPNSPRAEATLGGF | PRAEA | 0 | 0 | 0 | 0 | 0 | 0 | 41 | 0 | 0 |
| ZIKV | 9 | −1.55 | 233 | AGADTGTPHWNNKEA | GTPHW | 0 | 0 | 0 | 0 | 0 | 0 | 41 | 0 | 0 |
| ZIKV | 10 | −1.47 | 282 | EMDGAKGRLSSGHLK | KGRLS | 0 | 0 | 0 | 0 | 0 | 0 | 41 | 0 | 0 |
| ZIKV | 11 | −1.56 | 335 | EVQYAGTDGPCKVPA | GTDGP | 0 | 0 | 0 | 0 | 0 | 50 | 40 | 0 | 0 |
| ZIKV | 12 | −1.14 | 365 | ITANPVITESTENSK | VITES | 0 | 0 | 0 | 0 | 0 | 0 | 41 | 0 | 0 |
| ZIKV | 13 | −1.51 | 368 | NPVITESTENSKMML | ESTEN | 0 | 0 | 0 | 0 | 0 | 0 | 41 | 0 | 0 |
| ZIKV | 14 | −1.05 | 370 | VITESTENSKMMLEL | TENSK | 0 | 0 | 0 | 0 | 0 | 0 | 41 | 0 | 0 |
| CHIK | 1 | −1.14 | 40 | ALERIRNEATDGTLK | RNEAT | 0 | 0 | 0 | 0 | 0 | 0 | 0 | 30 | 0 |
| CHIK | 2 | −1.21 | 144 | GREKFHSRPQHGKEL | HSRPQ | 0 | 0 | 0 | 0 | 0 | 0 | 0 | 30 | 0 |
| CHIK | 3 | −1.18 | 249 | VPRNAELGDRKGKIH | EFGDR | 0 | 0 | 0 | 0 | 0 | 0 | 0 | 30 | 0 |
| CHIK | 4 | −1.46 | 274 | RVPKARNPTVTYGKN | RNPTV | 0 | 0 | 0 | 0 | 0 | 0 | 0 | 30 | 0 |
| CHIK | 5 | −1.14 | 276 | PKARNPTVTYGKNQV | PTVTY | 0 | 0 | 0 | 0 | 0 | 0 | 0 | 30 | 0 |
| CHIK | 6 | −1.27 | 303 | SYRNMGEEPNYQEEW | GEEPN | 0 | 0 | 0 | 0 | 0 | 0 | 0 | 30 | 0 |
| CHIK | 7 | −0.70 | 334 | EVTWGNNEPYKYWPQ | NNEPY | 0 | 0 | 0 | 0 | 0 | 0 | 0 | 30 | 0 |
| CHIK | 8 | −1.33 | 347 | PQLSTNGTAHGHPHE | NGTAH | 0 | 0 | 0 | 0 | 0 | 0 | 0 | 30 | 0 |
| USUV | 1 | −1.60 | 77 | TGEAHNPKRAEDTYV | PTTGE | 0 | 0 | 0 | 0 | 0 | 0 | 0 | 0 | 68 |
| USUV | 2 | −1.76 | 84 | KRAEDTYVCKSGVTD | NPKRA | 0 | 0 | 0 | 0 | 0 | 0 | 0 | 0 | 68 |
| USUV | 3 | −2.09 | 150 | DTHGNYSSQLGASQA | SSDTH | 0 | 0 | 0 | 0 | 0 | 0 | 0 | 0 | 67 |
| USUV | 4 | −1.35 | 154 | NYSSQLGASQAGRFT | HGNYS | 0 | 0 | 0 | 0 | 0 | 51 | 0 | 0 | 68 |
| USUV | 5 | −1.19 | 173 | SPAITVKMGDYGEIS | PNSPA | 0 | 0 | 0 | 0 | 0 | 0 | 0 | 0 | 67 |
| USUV | 6 | −1.13 | 194 | NGLNTEAYYIMSVGT | PRNGL | 0 | 0 | 0 | 0 | 0 | 0 | 0 | 0 | 68 |
| USUV | 7 | −1.27 | 228 | PASSNWRNREILLEF | TSPAS | 0 | 0 | 0 | 0 | 0 | 0 | 0 | 0 | 68 |
| USUV | 8 | −1.52 | 230 | SSNWRNREILLEFEE | PASSN | 0 | 0 | 0 | 0 | 0 | 0 | 0 | 0 | 67 |
| USUV | 9 | −1.17 | 247 | ATKQSVVALGSQEGA | PHATK | 0 | 0 | 0 | 0 | 0 | 51 | 0 | 0 | 68 |
| USUV | 10 | −1.04 | 312 | KNPADTGHGTVVLEL | FAKNP | 0 | 0 | 0 | 0 | 0 | 0 | 0 | 0 | 68 |
| USUV | 11 | −1.52 | 331 | SDGPCKIPISIVASL | TGSDG | 0 | 0 | 0 | 0 | 0 | 1 | 0 | 0 | 67 |
| USUV | 12 | −1.32 | 364 | SEANAKVLVEMEPPF | ASSEA | 0 | 0 | 0 | 0 | 0 | 0 | 0 | 0 | 68 |

[1517] The selected envelope USUV pentamer peptides were then evaluated against other pathogens of interest that are co-endemic. Some cross reactivity with SLE, JAEV and Hepatitis C was noted for peptides PTTGE, HGNYS, PHATK and FAKNP. As has been noted with other flaviviruses, some cross reactivity was found with Plasmodium falciparum. The parvovirus 19, enteroviruses and alphaviruses showed no similarity

TABLE 39
Evaluation of potential cross reactivity between
USUV pentaniers and other pathogens

| | | | | | | Ross | | Plasmodium |
|---|---|---|---|---|---|---|---|---|
| | SLE | HEPC | JAEV | Parvo19 | Entero | River | EEE | falciparum |
| Isolates | 3 | 539 | 11 | 225 | 90 | 12 | 4 | 1 |
| tested | | | | | | | | |
| Proteins | 24 | 539 | 11 | 225 | 990 | 109 | 44 | 5392 |
| USUV | | | | | | | | |
| peptide | | | | | | | | |
| PTTGE | 24 | 42 | 23 | 0 | 0 | 0 | 0 | 1 |
| NPKRA | 0 | 0 | 0 | 0 | 0 | 0 | 0 | 0 |
| SSDTH | 0 | 0 | 0 | 0 | 0 | 0 | 0 | 3 |
| HGNYS | 20 | 2 | 23 | 0 | 0 | 0 | 0 | 1 |
| PNSPA | 0 | 0 | 0 | 0 | 0 | 0 | 0 | 2 |
| PRNGL | 0 | 0 | 0 | 0 | 0 | 0 | 0 | 2 |
| TSPAS | 0 | 0 | 0 | 0 | 0 | 0 | 0 | 1 |
| PASSN | 0 | 0 | 0 | 0 | 0 | 0 | 0 | 0 |
| PHATK | 24 | 3 | 0 | 0 | 0 | 0 | 0 | 0 |
| FAKNP | 0 | 0 | 19 | 0 | 0 | 0 | 0 | 0 |
| TGSDG | 0 | 0 | 0 | 0 | 0 | 0 | 0 | 0 |
| ASSEA | 0 | 0 | 0 | 0 | 2 | 0 | 0 | 2 |

[1518] A similar selection and evaluation of peptides was then made from USUV NS1. The following peptides were selected as diagnostic array for USUV.

TABLE 40
Peptides from USUV NS1 protein

| | | Bepi Epitope | Position in | |
|---|---|---|---|---|
| | Pentamer | probability | NS1 | Flanking regions |
| SEQ 1231 | MPETP | −1.05 | 37 | DRYKFMPETPKQLAK |
| SEQ 1232 | PKGMY | −1.07 | 95 | VVVEKPKGMYKSAPQ |
| SEQ 1233 | PETKE | −1.55 | 140 | FVVDGPETKECPDVK |
| SEQ 1234 | HNTTD | −1.44 | 176 | LKVREHNTTDCDSSI |
| SEQ 1235 | PKSNH | −1.81 | 252 | VTLAGPKSNHNRREG |
| SEQ 1236 | QGPWD | −1.58 | 267 | YKVQSQGPWDEEDIV |
| SEQ 1237 | SIRTT | −1.52 | 299 | GKRGPSIRTTTSSGR |
| SEQ 1238 | RTTTS | −1.54 | 301 | RGPSIRTTTSSGRLV |

[1519] When compared to pentamers selected for other flaviviruses (see, e.g., copending U.S. Prov. Applications 62/286,779; 62/290,616; 62/292,964; 62/306,264; 62/321,375; and 62/350,881; each of which is incorporated herein by reference in its entirety) no cross reactivity was seen except for with WNV as seen in Table 41

TABLE 41
NS1 peptides from USUV showing lack of cross reactivity with other
flavivirus pentamers selected for a diagnostic array.

| Virus | # | Bepi Prob | Pos | Pentainer | Flanking | Den1 | Den2 | Den3 | Den4 | WNV | YF | ZIKV | USUV |
|---|---|---|---|---|---|---|---|---|---|---|---|---|---|
| DEN1 | 1 | −1.45 | 38 | DSPKR | YKFQADSPKRLSAAI | 74 | 0 | 160 | 0 | 0 | 0 | 0 | 0 |
| DEN1 | 2 | −0.75 | 104 | MIRPQ | AQGKKMIRPQPMEHK | 70 | 0 | 0 | 0 | 0 | 0 | 0 | 0 |
| DEN1 | 3 | −1.84 | 141 | TPECP | IDGPDTPECPDGQRA | 73 | 0 | 160 | 0 | 0 | 0 | 0 | 0 |
| DEN1 | 4 | −1.27 | 144 | CPDGQ | PDTPECPDGQRAWNI | 43 | 0 | 0 | 0 | 0 | 0 | 0 | 0 |
| DEN1 | 5 | −0.94 | 190 | KDSKA | MSAAIKDSKAVHADM | 74 | 0 | 0 | 0 | 0 | 0 | 0 | 0 |
| DEN1 | 6 | −1.17 | 206 | EKNET | YWIESEKNETWKLAR | 74 | 0 | 0 | 0 | 0 | 0 | 0 | 0 |
| DEN1 | 7 | −1.46 | 294 | NRGPS | DEHCGNRGPSLRTTT | 47 | 108 | 0 | 0 | 0 | 0 | 0 | 0 |
| DEN1 | 8 | −0.81 | 301 | TTTVT | GPSLRTTTVTGKIIH | 74 | 0 | 0 | 0 | 0 | 0 | 0 | 0 |
| DEN2 | 1 | −1.50 | 39 | SPSKL | KFQPESPSKLASAIQ | 0 | 107 | 0 | 0 | 0 | 0 | 0 | 0 |
| DEN2 | 2 | −2.00 | 105 | LRPQP | AGKRSLRPQPTELKY | 0 | 105 | 0 | 0 | 0 | 0 | 0 | 0 |
| DEN2 | 3 | −1.15 | 126 | STESH | KAKMLSTESHNQTFL | 0 | 97 | 0 | 0 | 0 | 0 | 0 | 0 |
| DEN2 | 4 | −1.43 | 142 | AECPN | DGPETAECPNTNRAW | 0 | 106 | 0 | 0 | 0 | 0 | 0 | 0 |
| DEN2 | 5 | −0.83 | 191 | DNRAV | SAAIKDNRAVHADMG | 0 | 106 | 0 | 0 | 0 | 0 | 0 | 0 |
| DEN2 | 6 | −1.03 | 248 | FAGPV | IIPKNFAGPVSQHNY | 0 | 105 | 0 | 0 | 0 | 0 | 0 | 0 |
| DEN2 | 7 | −1.02 | 262 | HTQTA | YRPGYHTQTAGPWHL | 0 | 105 | 159 | 0 | 0 | 0 | 0 | 0 |
| DEN2 | 8 | −1.37 | 291 | DCGNR | VVVTEDCGNRGPSLR | 0 | 106 | 0 | 0 | 0 | 0 | 0 | 0 |
| DEN3 | 1 | −1.40 | 37 | ADSPK | QYKFQADSPKRLATA | 74 | 0 | 160 | 0 | 0 | 0 | 0 | 0 |
| DEN3 | 2 | −1.33 | 103 | RTLTP | LKQGKRTLTPQPMEL | 0 | 0 | 1.58 | 0 | 0 | 0 | 0 | 0 |
| DEN3 | 3 | −1.80 | 140 | NTPEC | IIDGPNTPECPSASR | 1 | 0 | 157 | 0 | 0 | 0 | 0 | 0 |
| DEN3 | 4 | −0.90 | 190 | KDERA | MSAAVKDERAVHADM | 0 | 0 | 159 | 0 | 0 | 0 | 0 | 0 |
| DEN3 | 5 | −1.32 | 207 | KNGSW | WIESQKNGSWKLEKA | 0 | 0 | 160 | 0 | 0 | 0 | 0 | 0 |
| DEN3 | 6 | −1.11 | 257 | HRPGY | ISQHNHRPGYHTQTA | 0 | 0 | 141 | 0 | 0 | 0 | 0 | 0 |
| DEN3 | 7 | −0.86 | 290 | ENCGT | TVVITENCGTRGPSL | 0 | 0 | 160 | 0 | 0 | 0 | 0 | 0 |
| DEN3 | 8 | −0.86 | 301 | TTTVS | GPSLRTTTVSGKLIH | 0 | 0 | 160 | 0 | 0 | 0 | 0 | 0 |
| DEN4 | 1 | −1.18 | 39 | SPARL | KFQPESPARLASAIL | 0 | 0 | 0 | 29 | 0 | 0 | 0 | 0 |
| DEN4 | 2 | −1.63 | 104 | ALTPP | TKGKRALTPPVSDLK | 0 | 0 | 0 | 26 | 0 | 0 | 0 | 0 |
| DEN4 | 3 | −1.07 | 125 | FTPEA | GKAKIFTPEARNSTF | 0 | 0 | 0 | 28 | 0 | 0 | 0 | 0 |
| DEN4 | 4 | −1.81 | 140 | DTSEC | LIDGPDTSECPNERR | 0 | 0 | 0 | 29 | 0 | 0 | 0 | 0 |
| DEN4 | 5 | −1.25 | 207 | KNQTW | WIESSKNQTWQIEKA | 0 | 0 | 0 | 29 | 0 | 0 | 0 | 0 |
| DEN4 | 6 | −1.20 | 248 | YAGPF | LIPKSYAGPFSQHNY | 0 | 0 | 0 | 28 | 0 | 0 | 0 | 0 |
| DEN4 | 7 | −1.01 | 260 | GYATQ | HNYRQGYATQTVGPW | 0 | 0 | 0 | 29 | 0 | 0 | 0 | 0 |
| DEN4 | 8 | −1.19 | 292 | CDHRG | TIQEDCDHRGPSLRT | 0 | 0 | 0 | 29 | 0 | 0 | 0 | 0 |
| WNV | 1 | −1.69 | 38 | PETPQ | RYKYYPETPQGLAKI | 0 | 0 | 0 | 0 | 52 | 0 | 0 | 0 |
| WNV | 2 | −1.16 | 102 | APKRL | GMYKSAPKRLTATTE | 0 | 0 | 0 | 0 | 51 | 0 | 0 | 0 |
| WNV | 3 | −1.43 | 144 | ECPTQ | GPETKECPTQNRAWN | 0 | 0 | 0 | 0 | 51 | 0 | 0 | 0 |
| WNV | 4 | −1.74 | 177 | NTTEC | KVRESNTTECDSKII | 0 | 0 | 0 | 0 | 52 | 0 | 0 | 1 |
| WNV | 5 | −1.47 | 261 | GYKTQ | HNRRPGYKTQNQGPW | 0 | 0 | 0 | 0 | 52 | 0 | 0 | 0 |
| WNV | 6 | −1.90 | 266 | NQGPW | GYKTQNQGPWDEGRV | 0 | 0 | 0 | 0 | 52 | 0 | 0 | 0 |
| WNV | 7 | −1.67 | 297 | GPATR | SCGHRGPATRTTTES | 0 | 0 | 0 | 0 | 52 | 0 | 0 | 0 |
| WNV | 8 | −1.54 | 303 | TTESG | PATRTTTESGKLITD | 0 | 0 | 0 | 0 | 51 | 0 | 0 | 0 |
| YF | 1 | −1.21 | 35 | YYPED | LNKYSYYPEDPVKLA | 0 | 0 | 0 | 0 | 0 | 72 | 0 | 0 |
| YF | 2 | −1.41 | 140 | SRKEC | IIDGKSRKECPFSNR | 0 | 0 | 0 | 0 | 0 | 72 | 0 | 0 |
| YF | 3 | −2.21 | 193 | KSAHG | AVNGKKSAHGSPTFW | 0 | 0 | 0 | 0 | 0 | 72 | 0 | 0 |
| YF | 4 | −1.12 | 234 | GTSVE | LTHTIGTSVEESEMF | 0 | 0 | 0 | 0 | 0 | 72 | 0 | 0 |
| YF | 5 | −1.05 | 264 | QTNGP | PGYKVQTNGPWMQVP | 0 | 0 | 0 | 0 | 0 | 72 | 0 | 0 |
| YF | 6 | −2.05 | 295 | RGKST | GNCDGRGKSTRSTTD | 0 | 0 | 0 | 0 | 0 | 71 | 0 | 0 |
| YF | 7 | −2.15 | 301 | STTDS | GKSTRSTTDSGKVIP | 0 | 0 | 0 | 0 | 0 | 72 | 0 | 0 |
| YF | 8 | −1.15 | 338 | PRKTH | PMEIRPRKTHESHLV | 0 | 0 | 0 | 0 | 0 | 50 | 0 | 0 |
| ZIKV | 1 | −1.55 | 14 | KETRC | VDFSKKETRCGTGVF | 0 | 0 | 0 | 0 | 0 | 0 | 47 | 0 |
| ZIKV | 2 | −1.62 | 38 | HPDSP | DRYKYHPDSPRRLAA | 0 | 0 | 0 | 0 | 0 | 0 | 47 | 0 |
| ZIKV | 3 | −1.06 | 130 | AKTNN | HFVRAAKTNNSFVVD | 0 | 0 | 0 | 0 | 0 | 0 | 47 | 0 |
| ZIKV | 4 | −1.23 | 193 | GKEAV | GTAVKGKEAVHSDLG | 0 | 0 | 0 | 0 | 0 | 0 | 44 | 0 |
| ZIKV | 5 | −1.23 | 209 | KNDTW | WIESEKNDTWRLKRA | 0 | 0 | 0 | 0 | 0 | 0 | 47 | 0 |
| ZIKV | 6 | −1.36 | 259 | TREGY | LSHHNTREGYRTQMK | 0 | 0 | 0 | 0 | 0 | 0 | 45 | 0 |
| ZIKV | 7 | −0.86 | 291 | EETCG | TKVHVEETCGTRGPS | 0 | 0 | 0 | 0 | 0 | 0 | 47 | 0 |
| ZIKV | 8 | −1.56 | 303 | STTAS | GPSLRSTTASGRVIE | 0 | 0 | 0 | 0 | 0 | 0 | 46 | 0 |
| ZIKV | 9 | −1.85 | 341 | RKEPE | MEIRPRKEPESNLVR | 0 | 0 | 0 | 0 | 0 | 0 | 46 | 0 |
| USUV | 1 | −1.05 | 37 | MPETP | DRYKFMPETPKQLAK | 0 | 0 | 0 | 0 | 0 | 0 | 0 | 65 |
| USUV | 2 | −1.07 | 95 | PKGMY | VVVEKPKGMYKSAPQ | 0 | 0 | 0 | 0 | 0 | 0 | 0 | 66 |
| USUV | 3 | −1.55 | 140 | PETKE | FVVDGPETKECPDVK | 0 | 0 | 0 | 0 | 51 | 0 | 0 | 68 |
| USUV | 4 | −1.44 | 176 | HNTTD | LKVREHNTTDCDSSI | 0 | 0 | 0 | 0 | 0 | 0 | 0 | 65 |
| USUV | 5 | −1.81 | 252 | PKSNH | VTLAGPKSNHNRREG | 0 | 0 | 0 | 0 | 0 | 0 | 0 | 67 |
| USUV | 6 | −1.58 | 267 | QGPWD | YKVQSQGPWDEEDIV | 0 | 0 | 0 | 0 | 51 | 0 | 0 | 68 |
| USUV | 7 | −1.52 | 299 | SIRTT | GKRGPSIRTTTSSGR | 0 | 0 | 0 | 0 | 0 | 0 | 0 | 68 |
| USUV | 8 | −1.54 | 301 | RTTTS | RGPSIRTTTSSGRLV | 0 | 0 | 0 | 0 | 0 | 0 | 0 | 67 |

[1520] The selected USUV pentamers were then compared to various other potentially co-endemic pathogens, searching for the presence of the pentamers in these pathogens but not determining if they are present in B cell epitopes therein. Table 42 indicates where possible cross reactions may occur, particularly with other flaviviruses.

TABLE 42

| | | | | | | Ross | | Plasmodium |
|---|---|---|---|---|---|---|---|---|
| | SLE | HEPC | JAEV | Parvo19 | Entero | River | EEE | falciparum |
| Isolates | 3 | 539 | 11 | 225 | 90 | 12 | 4 | 1 |
| tested | | | | | | | | |
| Proteins | 24 | 539 | 11 | 225 | 990 | 109 | 44 | 5392 |
| USUV | | | | | | | | |
| peptide | | | | | | | | |
| MPETP | 0 | 0 | 0 | 0 | 0 | 0 | 0 | 0 |
| PKGMY | 0 | 0 | 0 | 0 | 0 | 0 | 0 | 0 |
| PETKE | 10 | 3 | 11 | 0 | 0 | 0 | 0 | 3 |
| HNTTD | 0 | 0 | 0 | 0 | 0 | 0 | 0 | 1 |
| PKSNH | 0 | 0 | 0 | 0 | 0 | 0 | 0 | 0 |
| QGPWD | 0 | 0 | 11 | 0 | 0 | 0 | 0 | 0 |
| SIRTT | 0 | 0 | 8 | 0 | 0 | 0 | 0 | 0 |
| RTTTS | 0 | 0 | 0 | 0 | 0 | 0 | 0 | 4 |

### REFERENCE LIST

[1521] [1] E.C.f.D.P.a. Control, Rapid risk assessment: Zika virus epidemic in the Americas: potential association with microcephaly and Guillain-Barré syndrome, Stockholm, December 2015.
[1522] [2] C.f.D. Control, Dengue Fact Sheet, 2006.
[1523] [3] S. B. Halstead, F. X. Heinz, A. D. Barrett, J. T. Roehrig, Dengue virus: molecular basis of cell entry and pathogenesis, 25-27 Jun. 2003, Vienna, Austria, Vaccine, 23 (2005) 849-856.
[1524] [4] C. Y. Lai, W. Y. Tsai, S. R. Lin, C. L. Kao, H. P. Hu, C. C. King, H. C. Wu, G. J. Chang, W. K. Wang, Antibodies to envelope glycoprotein of dengue virus during the natural course of infection are predominantly cross-reactive and recognize epitopes containing highly conserved residues at the fusion loop of domain II, J. Virol., 82 (2008) 6631-6643.
[1525] [5] R. C. Pinto, D. B. Castro, B. C. Albuquerque, S. Sampaio Vde, R. A. Passos, C. F. Costa, M. Sadahiro, J. U. Braga, Mortality Predictors in Patients with Severe Dengue in the State of Amazonas, Brazil, PloS one, 11 (2016) e0161884.
[1526] [6] P. R. Beatty, H. Puerta-Guardo, S. S. Killingbeck, D. R. Glasner, K. Hopkins, E. Harris, Dengue virus NS1 triggers endothelial permeability and vascular leak that is prevented by NS1 vaccination, Science translational medicine, 7 (2015) 304ra141.
[1527] [7] H. Puerta-Guardo, D. R. Glasner, E. Harris, Dengue Virus NS1 Disrupts the Endothelial Glycocalyx, Leading to Hyperpermeability, PLoS pathogens, 12 (2016) e1005738.
[1528] [8] S. J. Thomas, NS1: A corner piece in the dengue pathogenesis puzzle?, Science translational medicine, 7 (2015) 304fs337.
[1529] [9] U. Ashraf, J. Ye, X. Ruan, S. Wan, B. Zhu, S. Cao, Usutu virus: an emerging flavivirus in Europe, Viruses, 7 (2015) 219-238.
[1530] [10] A. E. Paniz-Mondolfi, W. E. Villamil-Gomez, A J. Rodriguez-Morales, Usutu virus infection in Latin America: A new emerging threat, Travel Med Infect Dis, (2016).
[1531] [11] F. A. Rey, F. X. Heinz, C. Mandl, C. Kunz, S. C. Harrison, The envelope glycoprotein from tick-borne encephalitis virus at 2 A resolution, Nature, 375 (1995) 291-298.
[1532] [12] V. C. Luca, J. AbiMansour, C. A. Nelson, D. H. Fremont, Crystal structure of the Japanese encephalitis virus envelope protein, Journal of virology, 86 (2012) 2337-2346.
[1533] [13] D. Gubler, Kuno G., Markoff L., Flaviviruses, in: D. Knipe, Howley, P M (Ed.) Field's Virology, Lippincott, Williams and Wilkins, Philadelphia, Pa., 2007, pp. 1153-1252.
[1534] [14] A. Santos-Carvalho, A. F. Ambrosio, C. Cavadas, Neuropeptide Y system in the retina: From localization to function, Progress in retinal and eye research, 47 (2015) 19-37.
[1535] [15] S. B. Halstead, Dengue Antibody-Dependent Enhancement: Knowns and Unknowns, Microbiology spectrum, 2 (2014).
[1536] [16] S. B. Halstead, S. Nimmannitya, S. N. Cohen, Observations related to pathogenesis of dengue hemorrhagic fever. IV. Relation of disease severity to antibody response and virus recovered, The Yale journal of biology and medicine, 42 (1970) 311-328.
[1537] [17] S. Porter, I. M. Clark, L. Kevorkian, D. R. Edwards, The ADAMTS metalloproteinases, Biochem J, 386 (2005) 15-27.
[1538] [18] A. D. Haddow, A. J. Schuh, C. Y. Yasuda, M. R. Kasper, V. Heang, R. Huy, H. Guzman, R. B. Tesh, S. C. Weaver, Genetic characterization of Zika virus strains: geographic expansion of the Asian lineage, PLoS neglected tropical diseases, 6 (2012) e1477.
[1539] [19] O. Faye, C. C. Freire, A. lamarino, O. Faye, J. V. de Oliveira, M. Diallo, P. M. Zanotto, A. A. Sail, Molecular evolution of Zika virus during its emergence in the 20(th) century, PLoS neglected tropical diseases, 8 (2014) e2636.
[1540] [20] E. Oehler, L. Watrin, P. Larre, I. Leparc-Goffart, S. Lastere, F. Valour, L. Baudouin, H. Mallet, D. Musso, F. Ghawche, Zika virus infection complicated by Guillain-Barre syndrome—case report, French Polynesia, December 2013, Euro surveillance: bulletin europeen sur les maladies transmissibles=European communicable disease bulletin, 19 (2014).
[1541] [21] R. W. Malone, J. Homan, M. V. Callahan, J. Glasspool-Malone, L. Damodaran, B. Schneider Ade, R. Zimler, J. Talton, R. R. Cobb, I. Ruzic, J. Smith-Gagen, D. Janies, J. Wilson, G. Zika Response Working, Zika Virus: Medical Countermeasure Development Challenges, PLoS neglected tropical diseases, 10 (2016) e0004530.
[1542] [22] P. Brasil, J. P. Pereira, Jr., M. E. Moreira, R. M. Ribeiro Nogueira, L. Damasceno, M. Wakimoto, R. S. Rabello, S. G. Valderramos, U. A. Halai, T. S. Salles, A. A. Zin, D. Horovitz, P. Daltro, M. Boechat, C. Raja Gabaglia, P. Carvalho de Sequeira, J. H. Pilotto, R. Medialdea-Carrera, D. Cotrim da Cunha, L. M. Abreu de Carvalho, M. Pone, A. Machado Siqueira, G. A. Calvet, A. E. Rodrigues Baiao, E. S. Neves, P. R. Nassar de Carvalho, R. H. Hasue, P. B. Marschik, C. Einspieler, C. Janzen, J. D. Cherry, A. M. Bispo de Filippis, K. Nielsen-Saines, Zika Virus Infection in Pregnant Women in Rio de Janeiro, The New England journal of medicine, 375 (2016) 2321-2334.
[1543] [23] M. A. Honein, A. L. Dawson, E. E. Petersen, A. M. Jones, E. H. Lee, M. M. Yazdy, N. Ahmad, J. Macdonald, N. Evert, A. Bingham, S. R. Ellington, C. K. Shapiro-Mendoza, T. Oduyebo, A. D. Fine, C. M. Brown, J. N. Sommer, J. Gupta, P. Cavicchia, S. Slavinski, J. L. White, S. M. Owen, L. R. Petersen, C. Boyle, D. Meaney-Delman, DJ. Jamieson, U. S. Z. P. R. Collaboration, Birth Defects Among Fetuses and Infants of US Women With Evidence of Possible Zika Virus Infection During Pregnancy, JAMA, 317 (2017) 59-68.
[1544] [24] V.-M. B. Cao-Lormeau, A.; Mons, S.; Lastere, S.; Roche, C.; Vanhomwegan, J.; Dub, T.; Baudouin, L.; Teissier, A.; Larre, P.; Vial, A-L.; Decam, C.; Choumet, V.; Halstead, S. K.; Willison, H. J.; Musset, L.; Manuguerra, J-C.; Despres, P.; Fournier, E.; Mallet, H-P., Musso, D., Fontanet, A., Neil, J., Ghwache, F., Guillain-Barre Syndrome outbreak associated with Zika virus infection in French Polynesia: a case control study, Lancet, (2016).
[1545] [25] J. M. Anaya, Y. Rodriguez, D. M. Monsalve, D. Vega, E. Ojeda, D. Gonzalez-Bravo, M. Rodriguez-Jimenez, C. A. Pinto-Diaz, P. Chaparro, M. L. Gunturiz, A. A. Ansari, M. E. Gershwin, N. Molano-Gonzalez, C. Ramirez-Santana, Y. Acosta-Ampudia, A comprehensive analysis and immunobiology of autoimmune neurological syndromes during the Zika virus outbreak in Cucuta, Colombia, Journal of autoimmunity, (2017).
[1546] [26] E. Goncalves, Acute inflammatory demyelinating polyradiculoneuropathy (Guillain-Barre syndrome) following dengue fever, Revista do Instituto de Medicina Tropical de Sao Paulo, 53 (2011) 223-225.
[1547] [27] B. Roze, F. Najioullah, J. L. Ferge, K. Apetse, Y. Brouste, R. Cesaire, C. Fagour, L. Fagour, P. Hochedez, S. Jeannin, J. Joux, H. Mehdaoui, R. Valentino, A. Signate, A. Cabie, G. B. S. Z. W. Group, Zika virus detection in urine from patients with Guillain-Barre syndrome on Martinique, January 2016, Euro surveillance: bulletin europeen sur les maladies transmissibles=European communicable disease bulletin, 21 (2016).
[1548] [28] B. Roze, F. Najioullah, A. Signate, K. Apetse, Y. Brouste, S. Gourgoudou, L. Fagour, S. Abel, P. Hochedez, R. Cesaire, A. Cabie, M. Neuro-Zika Working Group of, Zika virus detection in cerebrospinal fluid from two patients with encephalopathy, Martinique, February 2016, Euro surveillance: bulletin europeen sur les maladies transmissibles=European communicable disease bulletin, 21 (2016).
[1549] [29] D. Butler, Brazil asks whether Zika acts alone to cause birth defects, Nature, 535 (2016) 475-476.
[1550] [30] L. P. De Goes Cavalcanti, P. L. Tauil, C. H. Alencar, W. Oliveira, M. M. Teixeira, J. Heukelbach, Zika virus infection, associated microcephaly, and low yellow fever vaccination coverage in Brazil: is there any causal link?, J Infect Dev Ctries, 10 (2016) 563-566.
[1551] [31] S. Bhatt, P. W. Gething, O. J. Brady, J. P. Messina, A. W. Farlow, C. L. Moyes, J. M. Drake, J. S. Brownstein, A. G. Hoen, O. Sankoh, M. F. Myers, D. B. George, T. Jaenisch, G. R. Wint, C. P. Simmons, T. W. Scott, J. J. Farrar, S. I. Hay, The global distribution and burden of dengue, Nature, 496 (2013) 504-507.
[1552] [32] D. H. Libraty, P. R. Young, D. Pickering, T. P. Endy, S. Kalayanarooj, S. Green, D. W. Vaughn, A. Nisalak, F. A. Ennis, A. L. Rothman, High circulating levels of the dengue virus nonstructural protein NS1 early in dengue illness correlate with the development of dengue hemorrhagic fever, J Infect Dis, 186 (2002) 1165-1168.
[1553] [33] C. V. Ventura, M. Maia, V. Bravo-Filho, A. L. Gois, R. Belfort, Jr., Zika virus in Brazil and macular atrophy in a child with microcephaly, Lancet, (2016).
[1554] [34] C. Kowal, A. Athanassiou, H. Chen, B. Diamond, Maternal antibodies and developing blood-brain barrier, Immunologic research, 63 (2015) 18-25.
[1555] [35] B. Diamond, P. T. Huerta, P. Mina-Osorio, C. Kowal, B. T. Volpe, Losing your nerves? Maybe it's the antibodies, Nature reviews. Immunology, 9 (2009) 449-456.
[1556] [36] E. Fox, D. Amaral, J. Van de Water, Maternal and fetal antibrain antibodies in development and disease, Developmental neurobiology, 72 (2012) 1327-1334.
[1557] [37] W. Dejnirattisai, P. Supasa, W. Wongwiwat, A. Rouvinski, G. Barba-Spaeth, T. Duangchinda, A. Sakuntabhai, V. M. Cao-Lormeau, P. Malasit, F. A. Rey, J. Mongkolsapaya, G. R. Screaton, Dengue virus sero-cross-reactivity drives antibody-dependent enhancement of infection with zika virus, Nat Immunol, (2016).
[1558] [38] O. Karimi, A. Goorhuis, J. Schinkel, J. Codrington, S. G. Vreden, J. S. Vermaat, C. Stijnis, M. P. Grobusch, Thrombocytopenia and subcutaneous bleedings in a patient with Zika virus infection, Lancet, (2016).
[1559] [39] T. M. Sharp, J. Munoz-Jordan, J. Perez-Padilla, M. I. Bello-Pagan, A. Rivera, D. M. Pastula, J. L. Salinas, J. H. Martinez Mendez, M. Mendez, A. M. Powers, S. Waterman, B. Rivera-Garcia, Zika Virus Infection Associated with Severe Thrombocytopenia, Clinical infectious diseases: an official publication of the Infectious Diseases Society of America, (2016).
[1560] [40] A. K. Falconar, The dengue virus nonstructural-1 protein (NS1) generates antibodies to common epitopes on human blood clotting, integrin/adhesin proteins and binds to human endothelial cells: potential implications in haemorrhagic fever pathogenesis, Arch. Virol., 142 (1997) 897-916.
[1561] [41] K. Djamiatun, AJ. van der Ven, P. G. de Groot, S. M. Faradz, D. Hapsari, W. M. Dolmans, S. Sebastian, R. Fijnheer, C. de Mast, Severe dengue is associated with consumption of von Willebrand factor and its cleaving enzyme ADAMTS-13, PLoS neglected tropical diseases, 6 (2012) e1628.
[1562] [42] Y. C. Chuang, J. Lin, Y. S. Lin, S. Wang, T. M. Yeh, Dengue Virus Nonstructural Protein 1-Induced Antibodies Cross-React with Human Plasminogen and Enhance Its Activation, J Immunol, 196 (2016) 1218-1226.
[1563] [43] HJ. Cheng, Y. H. Luo, S. W. Wan, C. F. Lin, S. T. Wang, N. T. Hung, C. C. Liu, T. S. Ho, H. S. Liu, T. M. Yeh, Y. S. Lin, Correlation between serum levels of anti-endothelial cell autoantigen and anti-dengue virus nonstructural protein 1 antibodies in dengue patients, The American journal of tropical medicine and hygiene, 92 (2015) 989-995.
[1564] [44] E. Roberts, DJ. Hampshire, L. Pattison, K. Springell, H. Jafri, P. Corry, J. Mannon, Y. Rashid, Y. Crow, J. Bond, C. G. Woods, Autosomal recessive primary microcephaly: an analysis of locus heterogeneity and phenotypic variation, J Med Genet, 39 (2002) 718-721.
[1565] [45] C. Speake, A. Pichugin, T. Sahu, V. Malkov, R. Morrison, Y. Pei, L. Juompan, N. Milman, S. Zarling, C. Anderson, S. Wong-Madden, J. Wendler, A. Ishizuka, Z. W. MacMillen, V. Garcia, S. H. Kappe, U. Krzych, P. E. Duffy, Identification of Novel Pre-Erythrocytic Malaria Antigen Candidates for Combination Vaccines with Circumsporozoite Protein, PloS one, 11 (2016) e0159449.
[1566] [46] M. Van Esbroeck, K. Meersman, J. Michiels, K. K. Arien, D. Van den Bossche, Letter to the editor: Specificity of Zika virus ELISA: interference with malaria, Euro surveillance: bulletin europeen sur les maladies transmissibles=European communicable disease bulletin, 21 (2016).
[1567] [47] G. Robin, Y. Sato, D. Desplancq, N. Rochel, E. Weiss, P. Martineau, Restricted diversity of antigen binding residues of antibodies revealed by computational alanine scanning of 227 antibody-antigen complexes, J Mol Biol, 426 (2014) 3729-3743.
[1568] [48] H. Zhao, E. Fernandez, K. A. Dowd, S. D. Speer, D. J. Platt, M. J. Gorman, J. Govero, C. A. Nelson, T. C. Pierson, M. S. Diamond, D. H. Fremont, Structural Basis of Zika Virus-Specific Antibody Protection, Cell, (2016).
[1569] [49] R. D. Bremel, E. J. Homan, Frequency Patterns of T-Cell Exposed Amino Acid Motifs in Immunoglobulin Heavy Chain Peptides Presented by MHCs, Frontiers in immunology, 5 (2014) 541.
[1570] [50] A. Enfissi, J. Codrington, J. Roosblad, M. Kazanji, D. Rousset, Zika virus genome from the Americas, Lancet, (2016).
[1571] [51] K. Morl, A. G. Beck-Sickinger, Intracellular Trafficking of Neuropeptide Y Receptors, Progress in molecular biology and translational science, 132 (2015) 73-96.
[1572] [52] A. Santos-Carvalho, A. R. Alvaro, J. Martins, A. F. Ambrosio, C. Cavadas, Emerging novel roles of neuropeptide Y in the retina: from neuromodulation to neuroprotection, Prog Neurobiol, 112 (2014) 70-79.
[1573] [53] E. M. McNeill, M. Klockner-Bormann, E. C. Roesler, L. E. Talton, D. Moechars, M. Clagett-Dame, Nav2 hypomorphic mutant mice are ataxic and exhibit abnormalities in cerebellar development, Developmental biology, 353 (2011) 331-343.
[1574] [54] E. M. McNeill, K. P. Roos, D. Moechars, M. Clagett-Dame, Nav2 is necessary for cranial nerve development and blood pressure regulation, Neural development, 5 (2010) 6.
[1575] [55] M. Flamand, F. Megret, M. Mathieu, J. Lepault, F. A. Rey, V. Deubel, Dengue virus type 1 nonstructural glycoprotein NS1 is secreted from mammalian cells as a soluble hexamer in a glycosylation-dependent fashion, Journal of virology, 73 (1999) 6104-6110.
[1576] [56] P. R. Young, P. A. Hilditch, C. Bletchly, W. Halloran, An antigen capture enzyme-linked immunosorbent assay reveals high levels of the dengue virus protein NS1 in the sera of infected patients, Journal of clinical microbiology, 38 (2000) 1053-1057.
[1577] [57] S. Alcon-LePoder, P. Sivard, M. T. Drouet, A. Talarmin, C. Rice, M. Flamand, Secretion of flaviviral non-structural protein NS1: from diagnosis to pathogenesis, Novartis Found Symp, 277 (2006) 233-247; discussion 247-253.
[1578] [58] G. Kuno, A. V. Vorndam, D. J. Gubler, I. Gomez, Study of anti-dengue NS1 antibody by western blot, J. Med. Virol., 32 (1990) 102-108.
[1579] [59] I. J. Liu, C. Y. Chiu, Y. C. Chen, H. C. Wu, Molecular mimicry of human endothelial cell antigen by autoantibodies to nonstructural protein 1 of dengue virus, J Biol Chem, 286 (2011) 9726-9736.
[1580] [60] A. K. Falconar, The dengue virus nonstructural-1 protein (NS1) generates antibodies to common epitopes on human blood clotting, integrin/adhesin proteins and binds to human endothelial cells: potential implications in haemorrhagic fever pathogenesis, Archives of virology, 142 (1997) 897-916.
[1581] [61] M. A. Edeling, M. S. Diamond, D. H. Fremont, Structural basis of Flavivirus NS1 assembly and antibody recognition, Proc Natl Acad Sci USA, 111 (2014) 4285-4290.
[1582] [62] J. Bond, E. Roberts, G. H. Mochida, D. J. Hampshire, S. Scott, J. M. Askham, K. Springell, M. Mahadevan, Y. J. Crow, A. F. Markham, C. A. Walsh, C. G. Woods, ASPM is a major determinant of cerebral cortical size, Nat Genet, 32 (2002) 316-320.
[1583] [63] M. A. Rujano, L. Sanchez-Pulido, C. Pennetier, G. le Dez, R. Basto, The microcephaly protein Asp regulates neuroepithelium morphogenesis by controlling the spatial distribution of myosin II, Nat Cell Biol, 15 (2013) 1294-1306.
[1584] [64] N. Kouprina, A. Pavlicek, N. K. Collins, M. Nakano, V. N. Noskov, J. Ohzeki, G. H. Mochida, J. I. Risinger, P. Goldsmith, M. Gunsior, G. Solomon, W. Gersch, J. H. Kim, J. C. Barrett, C. A. Walsh, J. Jurka, H. Masumoto, V. Larionov, The microcephaly ASPM gene is expressed in proliferating tissues and encodes for a mitotic spindle protein, Hum Mol Genet, 14 (2005) 2155-2165.
[1585] [65] C. C. Homem, M. Repic, J. A. Knoblich, Proliferation control in neural stem and progenitor cells, Nat Rev Neurosci, 16 (2015) 647-659.
[1586] [66] J J. Schlesinger, M. W. Brandriss, E. E. Walsh, Protection of mice against dengue 2 virus encephalitis by immunization with the dengue 2 virus non-structural glycoprotein NS1, The Journal of general virology, 68 (Pt 3) (1987) 853-857.
[1587] [67] A. J. Goncalves, E. R. Oliveira, S. M. Costa, M. V. Paes, J. F. Silva, A. S. Azevedo, M. Mantuano-Barradas, A. C. Nogueira, CJ. Almeida, A. M. Alves, Cooperation between CD4+ T Cells and Humoral Immunity Is Critical for Protection against Dengue Using a DNA Vaccine Based on the NS1 Antigen, PLoS neglected tropical diseases, 9 (2015) e0004277.
[1588] [68] K. M. Chung, G. E. Nybakken, B. S. Thompson, MJ. Engle, A. Marri, D. H. Fremont, M. S. Diamond, Antibodies against West Nile Virus nonstructural protein NS1 prevent lethal infection through Fc gamma receptor-dependent and -independent mechanisms, J. Virol., 80 (2006) 1340-1351.
[1589] [69] E. J. M. Homan, R. W.; Darnell, S.; Bremel, R. D.; Antibody mediated epitope mimicry in the pathogenesis of Zika virus related disease, Preprint posted on BioRXiv, (2016).
[1590] [70] HJ. Rogers, C. Allen, A. E. Lichtin, Thrombotic thrombocytopenic purpura: The role of ADAMTS13, Cleveland Clinic journal of medicine, 83 (2016) 597-603.
[1591] [71] X. L. Zheng, ADAMTS13 and von Willebrand factor in thrombotic thrombocytopenic purpura, Annu Rev Med, 66 (2015) 211-225.
[1592] [72] D. B. Cines, V. S. Blanchette, Immune thrombocytopenic purpura, The New England journal of medicine, 346 (2002) 995-1008.

1. A synthetic Zika virus polypeptide comprising one or more B cell epitopes and one or more peptides that each bind with high affinity to three or more different MHC II molecules.

2. The synthetic polypeptide of claim 1, wherein said polypeptide comprises B cell epitopes that are unique to Zika virus and do not elicit antibodies which cross react with a dengue virus.

3. The synthetic polypeptide of claim 1, wherein said polypeptide comprises one or more altered or deleted epitope mimic sequences so that the sequence of the synthetic Zika virus polypeptide is altered in comparison to the corresponding wild type Zika virus polypeptide.

4. The synthetic polypeptide sequence of claim 3, wherein said polypeptide comprising one or more altered or deleted epitope mimic sequences comprises a deletion or substitution mutation of one or more amino acids in said epitope mimic sequence so that the sequence of synthetic Zika virus polypeptide is altered in comparison to the corresponding wild type Zika virus polypeptide.

5. The synthetic polypeptide of claim 3, wherein said epitope mimic sequence is found in a human neurologic protein.

6. (canceled)

7. The synthetic polypeptide of claim 3, wherein said epitope mimic sequences are selected from the group of epitope mimic sequences identified by SEQ ID NOs: 1-34, 78-140, and 255-256.

8. The synthetic polypeptide of claim 1, wherein said synthetic polypeptide comprises a Zika virus immunogen from an envelope polypeptide of Zika virus.

9. The synthetic polypeptide sequence of claim 8, wherein said envelope polypeptide of Zika virus is selected from the group consisting of Zika virus Domain I, Domain II, and Domain III polypeptides.

10. The synthetic polypeptide sequence of claim 8, wherein said Zika virus immunogen is an immunogen encoded by an amino acid sequence selected from the group consisting of amino acids 38-444 of SEQ ID NO: 142, amino acids 38-143 of SEQ ID NO: 144, amino acids 38-125 of SEQ ID NO: 146, amino acids 38-113 of SEQ ID NO: 148, amino acids 24-429 of SEQ ID NO: 150, amino acids 24-128 of SEQ ID NO: 152, amino acids 24-110 of SEQ ID NO: 154, amino acids 24-98 of SEQ ID NO: 156, amino acids 30-435 of SEQ ID NO: 158, amino acids 30-134 of SEQ ID NO: 160, amino acids 30-116 of SEQ ID NO: 162, amino acids 30-104 of SEQ ID NO: 164, amino acids 38-143 of SEQ ID NO: 166, amino acids 24-128 of SEQ ID NO: 168, amino acids 30-134 of SEQ ID NO: 170, and amino acids 38-444 of SEQ ID NO: 254.

11. The synthetic polypeptide of claim 3, wherein said epitope mimic sequence is found in a human microcephaly associated protein.

12. The synthetic polypeptide of claim 11, wherein said human microcephaly associated protein is encoded by a gene selected from the group consisting of CDKRAP2, ASPM, and CEP135.

13. The synthetic polypeptide of claim 11, wherein said epitope mimic sequence is selected from the group of epitope mimic sequences identified by SEQ ID NOs: 452-456.

14. The synthetic polypeptide of claim 11, wherein said synthetic polypeptide comprises a Zika virus immunogen from a Zika virus protein selected from the group consisting of PrM, NS1, NS3, and NS4B.

15. The synthetic polypeptide of claim 14, wherein said Zika virus immunogen is an NS1 immunogen encoded by an amino acid sequence selected from the group consisting of amino acids 21 to 384 of SEQ ID NO:441, amino acids 21 to 213 of SEQ ID NO:443 and amino acids 21 to 213 of SEQ ID NO:445.

16-29. (canceled)

30. A fusion protein comprising the synthetic polypeptide sequences of claim 1.

31. The fusion protein of claim 30, wherein said fusion protein comprises a peptide sequence selected from the group consisting a signal sequence, a linker sequence, a purification tag sequence and an immunoglobulin sequence in operable association with said synthetic polypeptide, wherein said peptide sequence selected from the group consisting of a signal sequence, a linker sequence, a purification tag sequence and an immunoglobulin sequence is exogenous to said synthetic polypeptide sequence.

32-33. (canceled)

34. A vector comprising a nucleic acid sequence encoding a fusion protein according to claim 30, wherein said nucleic acid sequence encoding a synthetic polypeptide or fusion protein is operably linked to an exogenous promoter.

35-38. (canceled)

39. A vaccine comprising a synthetic according to claim 1 and a pharmaceutically acceptable carrier.

40. The vaccine of claim 39, further comprising an adjuvant.

41-193. (canceled)

The application's sequence listing, which the Patent Office published only in electronic form, follows.

SEQUENCE LISTING (1256 sequences)

SEQ ID NO: 1 - protein, 5 aa, Zika virus
PVITE

SEQ ID NO: 2 - protein, 5 aa, Zika virus
EGAVH

SEQ ID NO: 3 - protein, 5 aa, Zika virus
STENS

SEQ ID NO: 4 - protein, 5 aa, Zika virus
PVITE

SEQ ID NO: 5 - protein, 5 aa, Zika virus
PVITE

SEQ ID NO: 6 - protein, 5 aa, Zika virus
PVITE

SEQ ID NO: 7 - protein, 5 aa, Zika virus
KGRLS

SEQ ID NO: 8 - protein, 5 aa, Zika virus
PVITE

SEQ ID NO: 9 - protein, 5 aa, Zika virus
PVITE

SEQ ID NO: 10 - protein, 5 aa, Zika virus
PVITE

SEQ ID NO: 11 - protein, 5 aa, Zika virus
PVITE

SEQ ID NO: 12 - protein, 5 aa, Zika virus
PVITE

SEQ ID NO: 13 - protein, 5 aa, Zika virus
AGADT

SEQ ID NO: 14 - protein, 5 aa, Zika virus
KGRLS

SEQ ID NO: 15 - protein, 5 aa, Zika virus
KGRLS

SEQ ID NO: 16 - protein, 5 aa, Zika virus
KGRLS

SEQ ID NO: 17 - protein, 5 aa, Zika virus
KGRLS

SEQ ID NO: 18 - protein, 5 aa, Zika virus
KGRLS

SEQ ID NO: 19 - protein, 5 aa, Zika virus
KGRLS

SEQ ID NO: 20 - protein, 5 aa, Zika virus
KGRLS

SEQ ID NO: 21 - protein, 5 aa, Zika virus
KGRLS

SEQ ID NO: 22 - protein, 5 aa, Zika virus
KGRLS

SEQ ID NO: 23 - protein, 5 aa, Zika virus
KGRLS

SEQ ID NO: 24 - protein, 5 aa, Zika virus
KGRLS

SEQ ID NO: 25 - protein, 5 aa, Zika virus
ATLGG

SEQ ID NO: 26 - protein, 5 aa, Zika virus
ATLGG

SEQ ID NO: 27 - protein, 5 aa, Zika virus
LSSGH

SEQ ID NO: 28 - protein, 5 aa, Zika virus
GGALN

SEQ ID NO: 29 - protein, 5 aa, Zika virus
QPENL

SEQ ID NO: 30 - protein, 5 aa, Zika virus
AGADT

SEQ ID NO: 31 - protein, 5 aa, Zika virus
ESTEN

SEQ ID NO: 32 - protein, 5 aa, Zika virus
AGTDG

SEQ ID NO: 33 - protein, 5 aa, Zika virus
ATLGG

SEQ ID NO: 34 - protein, 5 aa, Zika virus
RAEAT

SEQ ID NO: 35 - protein, 5 aa, Zika virus
AGADT

SEQ ID NO: 36 - protein, 5 aa, Zika virus
AGADT

SEQ ID NO: 37 - protein, 5 aa, Zika virus
DGSPC

SEQ ID NO: 38 - protein, 5 aa, Zika virus
GEDAP

SEQ ID NO: 39 - protein, 5 aa, Zika virus
GNETT

SEQ ID NO: 40 - protein, 5 aa, Zika virus
GNETT

SEQ ID NO: 41 - protein, 5 aa, Zika virus
GNETT

SEQ ID NO: 42 - protein, 5 aa, Zika virus
GNETT

SEQ ID NO: 43 - protein, 5 aa, Zika virus
GNETT

SEQ ID NO: 44 - protein, 5 aa, Zika virus
KCPST

SEQ ID NO: 45 - protein, 5 aa, Zika virus
KNPVD

SEQ ID NO: 46 - protein, 5 aa, Zika virus
KNPVD

SEQ ID NO: 47 - protein, 5 aa, Zika virus
KNPVD

SEQ ID NO: 48 - protein, 5 aa, Zika virus
KNPVD

SEQ ID NO: 49 - protein, 5 aa, Zika virus
KNPVD

SEQ ID NO: 50 - protein, 5 aa, Zika virus
LKGTT

SEQ ID NO: 51 - protein, 5 aa, Zika virus
STTLK

SEQ ID NO: 52 - protein, 5 aa, Zika virus
STTLK

SEQ ID NO: 53 - protein, 5 aa, Zika virus
STTLK

SEQ ID NO: 54 - protein, 5 aa, Zika virus
STTLK

SEQ ID NO: 55 - protein, 5 aa, Zika virus
STTLK

SEQ ID NO: 56 - protein, 5 aa, Zika virus
TDKEK

SEQ ID NO: 57 - protein, 5 aa, Zika virus
TDKEK

SEQ ID NO: 58 - protein, 5 aa, Zika virus
TDKEK

SEQ ID NO: 59 - protein, 5 aa, Zika virus
TDKEK

SEQ ID NO: 60 - protein, 5 aa, Zika virus
TDKEK

SEQ ID NO: 61 - protein, 5 aa, Zika virus
TDKEK

SEQ ID NO: 62 - protein, 5 aa, Zika virus
TDKEK

SEQ ID NO: 63 - protein, 5 aa, Zika virus
TDKEK

SEQ ID NO: 64 - protein, 5 aa, Zika virus
TDKEK

SEQ ID NO: 65 - protein, 5 aa, Zika virus
TDKEK

SEQ ID NO: 66 - protein, 5 aa, Zika virus
TDKEK

SEQ ID NO: 67 - protein, 5 aa, Zika virus
TDKEK

SEQ ID NO: 68 - protein, 5 aa, Zika virus
TPQAP

SEQ ID NO: 69 - protein, 5 aa, Zika virus
TPQAP

SEQ ID NO: 70 - protein, 5 aa, Zika virus
TPQAP

SEQ ID NO: 71 - protein, 5 aa, Zika virus
TPQAP

SEQ ID NO: 72 - protein, 5 aa, Zika virus
TPQAP

SEQ ID NO: 73 - protein, 5 aa, Zika virus
TPQAP

SEQ ID NO: 74 - protein, 5 aa, Zika virus
TPQAP

SEQ ID NO: 75 - protein, 5 aa, Zika virus
TPQAP

SEQ ID NO: 76 - protein, 5 aa, Zika virus
TPQAP

SEQ ID NO: 77 - protein, 5 aa, Zika virus
TPQAP

SEQ ID NO: 78 - protein, 5 aa, Zika virus
LAGAL

SEQ ID NO: 79 - protein, 5 aa, Zika virus
ALAGA

SEQ ID NO: 80 - protein, 5 aa, Zika virus
KKEAM

SEQ ID NO: 81 - protein, 5 aa, Zika virus
KKEAM

SEQ ID NO: 82 - protein, 5 aa, Zika virus
EAMEI

SEQ ID NO: 83 - protein, 5 aa, Zika virus
EAMEI

SEQ ID NO: 84 - protein, 5 aa, Zika virus
EAMEI

SEQ ID NO: 85 - protein, 5 aa, Zika virus
EAMEI

SEQ ID NO: 86 - protein, 5 aa, Zika virus
EAMEI

SEQ ID NO: 87 - protein, 5 aa, Zika virus
RKEKK

SEQ ID NO: 88 - protein, 5 aa, Zika virus
RKEKK

SEQ ID NO: 89 - protein, 5 aa, Zika virus
RKEKK

SEQ ID NO: 90 - protein, 5 aa, Zika virus
KEKKR

SEQ ID NO: 91 - protein, 5 aa, Zika virus
KEKKR

SEQ ID NO: 92 - protein, 5 aa, Zika virus
KEKKR

SEQ ID NO: 93 - protein, 5 aa, Zika virus
EKKRR

SEQ ID NO: 94 - protein, 5 aa, Zika virus
EKKRR

SEQ ID NO: 95 - protein, 5 aa, Zika virus
EKKRR

SEQ ID NO: 96 - protein, 5 aa, Zika virus
EKKRR

SEQ ID NO: 97 - protein, 5 aa, Zika virus
EKKRR

SEQ ID NO: 98 - protein, 5 aa, Zika virus
EKKRR

SEQ ID NO: 99 - protein, 5 aa, Zika virus
RRGAD

SEQ ID NO: 100 - protein, 5 aa, Zika virus
GADTS

SEQ ID NO: 101 - protein, 5 aa, Zika virus
GADTS

SEQ ID NO: 102 - protein, 5 aa, Zika virus
GADTS

SEQ ID NO: 103 - protein, 5 aa, Zika virus
GADTS

SEQ ID NO: 104 - protein, 5 aa, Zika virus
ADTSV

SEQ ID NO: 105 - protein, 5 aa, Zika virus
ADTSV

SEQ ID NO: 106 - protein, 5 aa, Zika virus
KKEAM

SEQ ID NO: 107 - protein, 5 aa, Zika virus
KKEAM

SEQ ID NO: 108 - protein, 5 aa, Zika virus
ARRSR

SEQ ID NO: 109 - protein, 5 aa, Zika virus
ARRSR

SEQ ID NO: 110 - protein, 5 aa, Zika virus
KLQTR

SEQ ID NO: 111 - protein, 5 aa, Zika virus
KLQTR

SEQ ID NO: 112 - protein, 5 aa, Zika virus
REYTK

SEQ ID NO: 113 - protein, 5 aa, Zika virus
REYTK

SEQ ID NO: 114 - protein, 5 aa, Zika virus
REYTK

SEQ ID NO: 115 - protein, 5 aa, Zika virus
REYTK

SEQ ID NO: 116 - protein, 5 aa, Zika virus
REYTK

SEQ ID NO: 117 - protein, 5 aa, Zika virus
REYTK

SEQ ID NO: 118 - protein, 5 aa, Zika virus
RKLQT

SEQ ID NO: 119 - protein, 5 aa, Zika virus
RKLQT

SEQ ID NO: 120 - protein, 5 aa, Zika virus
SHSTR

SEQ ID NO: 121 - protein, 5 aa, Zika virus
SHSTR

SEQ ID NO: 122 - protein, 5 aa, Zika virus
SHSTR

SEQ ID NO: 123 - protein, 5 aa, Zika virus
SHSTR

SEQ ID NO: 124 - protein, 5 aa, Zika virus
SHSTR

SEQ ID NO: 125 - protein, 5 aa, Zika virus
SHSTR

SEQ ID NO: 126 - protein, 5 aa, Zika virus
SHSTR

SEQ ID NO: 127 - protein, 5 aa, Zika virus
SHSTR

SEQ ID NO: 128 - protein, 5 aa, Zika virus
SHSTR

SEQ ID NO: 129 - protein, 5 aa, Zika virus
SHSTR

SEQ ID NO: 130 - protein, 5 aa, Zika virus
SHSTR

SEQ ID NO: 131 - protein, 5 aa, Zika virus
SHSTR

SEQ ID NO: 132 - protein, 5 aa, Zika virus
SHSTR

SEQ ID NO: 133 - protein, 5 aa, Zika virus
SHSTR

SEQ ID NO: 134 - protein, 5 aa, Zika virus
SHSTR

SEQ ID NO: 135 - protein, 5 aa, Zika virus
SHSTR

SEQ ID NO: 136 - protein, 5 aa, Zika virus
TLPSH

SEQ ID NO: 137 - protein, 5 aa, Zika virus
TLPSH

SEQ ID NO: 138 - protein, 5 aa, Zika virus
ARRSR

SEQ ID NO: 139 - protein, 5 aa, Zika virus
ARRSR

SEQ ID NO: 140 - protein, 5 aa, Zika virus
ARRSR

SEQ ID NO: 141 - DNA, 1332 bp, Zika virus
atggagacagacacactcctgctatgggtactgctgctctgggttccaggttccactggtgacacgcgtcatcaccatcaccatcacgactacaaggacgacgacgacaagcgctgtataggggtcagcaatagggatttcgttgagggcatgtccggtggaacatgggtggatatagtcctggaacatggagggtgcgttacagttatggctcaagataaacccaccgtagatattgaattggtgacaaccacagtgtctaacatggccgaagttcggagctattgttatgaagccagtatcagcgacatggcttccgattcacgctgcccaacccagggtgaagcctacttggataagcaaagcgatacacaatatgtctgcaagcgaaccctggtagatcgagggtgggggaatggctgcgggttgttcggcaagggatctctcgtcacatgcgccaaatttgcatgcagtaagaaaatgaccggaaaatccatacagcccgagaacctggaatatcggatcatgctctctgtccacggaagtcagcattccggtatgatcgtgaatgacaccgggcatgagaccgacgaaaacagggccaaagtcgagattacccccaattctccccgcgcagaggcaaccctcggaggatttggaagcctgggactggactgtgaaccaaggactggactcgacttcagcgacctctattatctcacaatgaataataagcactggcttgtacataaagaatggtttcacgacattcctcttccctggcacgccggggccgacacaggaacaccacactggaataacaaagaagctcttgtggagttcaaagacgctcacgcaaagcgccaaaccgtagtggtgctgggcagccaagaaggagccgttcacacagccttggctggggcattggaggctgaaatggacggagccaaggggcggctctcaagtggacaccttaagtgccgcctgaaaatggataagctgagattgaagggcgtatcttattccctgtgtacagccgcatttacttttactaagattcctgccgaaacccttcacgggacagtaactgtagaggtacagtacgcagggactgacggtccttgcaaagtacccgcacaaatggccgtagacatgcaaaccctcactcctgttgggcgactgatcaccgctaacccagttataactgagtccaccgaaaactccaaaatgatgcttgagttggaccctcctttcggtgacagttatatcgttataggcgtgggggaaaagaagattactcaccattggcaccgcagcggtagtactatctag

SEQ ID NO: 142 - protein, 443 aa, Zika virus
METDTLLLWVLLLWVPGSTGDTRHHHHHHDYKDDDDKRCIGVSNRDFVEGMSGGTWVDIVLEHGGCVTVMAQDKPTVDIELVTTTVSNMAEVRSYCYEASISDMASDSRCPTQGEAYLDKQSDTQYVCKRTLVDRGWGNGCGLFGKGSLVTCAKFACSKKMTGKSIQPENLEYRIMLSVHGSQHSGMIVNDTGHETDENRAKVEITPNSPRAEATLGGFGSLGLDCEPRTGLDFSDLYYLTMNNKHWLVHKEWFHDIPLPWHAGADTGTPHWNNKEALVEFKDAHAKRQTVVVLGSQEGAVHTALAGALEAEMDGAKGRLSSGHLKCRLKMDKLRLKGVSYSLCTAAFTFTKIPAETLHGTVTVEVQYAGTDGPCKVPAQMAVDMQTLTPVGRLITANPVITESTENSKMMLELDPPFGDSYIVIGVGEKKITHHWHRSGSTI

SEQ ID NO: 143 - DNA, 429 bp, Zika virus
atggagacagacacactcctgctatgggtactgctgctctgggttccaggttccactggtgacacgcgtcatcaccatcaccatcacgactacaaggacgacgacgacaaggtgtcctactccctgtgcaccgccgccttcaccttcaccaagatccccgccgagaccctgcacggcaccgtgaccgtggaggtgcagtacgccggcaccgacggcccctgcaaggtgcccgcccagatggccgtggacatgcagaccctgacccccgtgggccgcctgatcaccgccaaccccgtgatcaccgagtccaccgagaactccaagatgatgctggagctggacccccccttcggcgactcctacatcgtgatcggcgtgggcgagaagaagatcacccaccactggcaccgctccggctccaccatctag

SEQ ID NO: 144 - protein, 142 aa, Zika virus
METDTLLLWVLLLWVPGSTGDTRHHHHHHDYKDDDDKVSYSLCTAAFTFTKIPAETLHGTVTVEVQYAGTDGPCKVPAQMAVDMQTLTPVGRLITANPVITESTENSKMMLELDPPFGDSYIVIGVGEKKITHHWHRSGSTI

SEQ ID NO: 145 - DNA, 375 bp, Zika virus
atggagacagacacactcctgctatgggtactgctgctctgggttccaggttccactggtgacacgcgtcatcaccatcaccatcacgactacaaggacgacgacgacaagatctccgacatggcctccgactcccgctgccccacccagggcgaggcctacctggacaagcagtccgacacccagtacgtgtgcaagcgcaccctggtggaccgcggctggggcaacggctgcggcctgttcggcaagggctccctggtgacctgcgccaagttcgcctgctccaagaagatgaccggcaagtccatccagcccgagaacctggagtaccgcatcatgctgtccgtgcacggctcccagcactccggcatgtag

SEQ ID NO: 146 - protein, 124 aa, Zika virus
METDTLLLWVLLLWVPGSTGDTRHHHHHHDYKDDDDKISDMASDSRCPTQGEAYLDKQSDTQYVCKRTLVDRGWGNGCGLFGKGSLVTCAKFACSKKMTGKSIQPENLEYRIMLSVHGSQHSGM

SEQ ID NO: 147 - DNA, 339 bp, Zika virus
atggagacagacacactcctgctatgggtactgctgctctgggttccaggttccactggtgacacgcgtcatcaccatcaccatcacgactacaaggacgacgacgacaagatcgtgaacgacactggacacgagactgatgagaatcgagctaaggttgaaattactccaaactccccccgagctgaggctacactggggggattcggaagtcttgggcttgattgcgagccaagaaccgggcttgacttctcagacttgtactatctgacaatgaacaataagcattggcttgttcacaaggagtggttccacgatataccattgccttggcactag

SEQ ID NO: 148 - protein, 112 aa, Zika virus
METDTLLLWVLLLWVPGSTGDTRHHHHHHDYKDDDDKIVNDTGHETDENRAKVEITPNSPRAEATLGGFGSLGLDCEPRTGLDFSDLYYLTMNNKHWLVHKEWFHDIPLPWH

SEQ ID NO: 149 - DNA, 2016 bp, Zika virus
atggagacagacacactcctgctatgggtactgctgctctgggttccaggttccactggtgacacgcgtcgctgtataggggtcagcaatagggatttcgttgagggcatgtccggtggaacatgggtggatatagtcctggaacatggagggtgcgttacagttatggctcaagataaacccaccgtagatattgaattggtgacaaccacagtgtctaacatggccgaagttcggagctattgttatgaagccagtatcagcgacatggcttccgattcacgctgcccaacccagggtgaagcctacttggataagcaaagcgatacacaatatgtctgcaagcgaaccctggtagatcgagggtgggggaatggctgcgggttgttcggcaagggatctctcgtcacatgcgccaaatttgcatgcagtaagaaaatgaccggaaaatccatacagcccgagaacctggaatatcggatcatgctctctgtccacggaagtcagcattccggtatgatcgtgaatgacaccgggcatgagaccgacgaaaacagggccaaagtcgagattacccccaattctccccgcgcagaggcaaccctcggaggatttggaagcctgggactggactgtgaaccaaggactggactcgacttcagcgacctctattatctcacaatgaataataagcactggcttgtacataaagaatggtttcacgacattcctcttccctggcacgccggggccgacacaggaacaccacactggaataacaaagaagctcttgtggagttcaaagacgctcacgcaaagcgccaaaccgtagtggtgctgggcagccaagaaggagccgttcacacagccttggctggggcattggaggctgaaatggacggagccaaggggcggctctcaagtggacaccttaagtgccgcctgaaaatggataagctgagattgaagggcgtatcttattccctgtgtacagccgcatttacttttactaagattcctgccgaaacccttcacgggacagtaactgtagaggtacagtacgcagggactgacggtccttgcaaagtacccgcacaaatggccgtagacatgcaaaccctcactcctgttgggcgactgatcaccgctaacccagttataactgagtccaccgaaaactccaaaatgatgcttgagttggaccctcctttcggtgacagttatatcgttataggcgtgggggaaaagaagattactcaccattggcaccgcagcggtagtactatcgactacaaggacgacgacgacaaggtcgacgagcccaaatcttgtgacaaaactcacacatgcccaccgtgcccagcacctgaactcctggggggaccgtcagtcttcctcttccccccaaaacccaaggacaccctcatgatctcccggacccctgaggtcacatgcgtggtggtggacgtgagccacgaagaccctgaggtcaagttcaactggtacgtggacggcgtggaggtgcataatgccaagacaaagccgcgggaggagcagtacaacagcacgtaccgtgtggtcagcgtcctcaccgtcctgcaccaggactggctgaatggcaaggagtacaagtgcaaggtctccaacaaagccctcccagcccccatcgagaaaaccatctccaaagccaaagggcagccccgagaaccacaggtgtacaccctgcccccatcccgggaggagatgaccaagaaccaggtcagcctgacctgcctggtcaaaggcttctatcccagcgacatcgccgtggagtgggagagcaatgggcagccggagaacaactacaagaccacgcctcccgtgctggactccgacggctccttcttcctctatagcaagctcaccgtggacaagagcaggtggcagcaggggaacgtcttctcatgctccgtgatgcatgaggctctgcacaaccactacacgcagaagagcctctccctgtctccgggtaaatga

SEQ ID NO: 150 - protein, 671 aa, Zika virus
METDTLLLWVLLLWVPGSTGDTRRCIGVSNRDFVEGMSGGTWVDIVLEHGGCVTVMAQDKPTVDIELVTTTVSNMAEVRSYCYEASISDMASDSRCPTQGEAYLDKQSDTQYVCKRTLVDRGWGNGCGLFGKGSLVTCAKFACSKKMTGKSIQPENLEYRIMLSVHGSQHSGMIVNDTGHETDENRAKVEITPNSPRAEATLGGFGSLGLDCEPRTGLDFSDLYYLTMNNKHWLVHKEWFHDIPLPWHAGADTGTPHWNNKEALVEFKDAHAKRQTVVVLGSQEGAVHTALAGALEAEMDGAKGRLSSGHLKCRLKMDKLRLKGVSYSLCTAAFTFTKIPAETLHGTVTVEVQYAGTDGPCKVPAQMAVDMQTLTPVGRLITANPVITESTENSKMMLELDPPFGDSYIVIGVGEKKITHHWHRSGSTIDYKDDDDKVDEPKSCDKTHTCPPCPAPELLGGPSVFLFPPKPKDTLMISRTPEVTCVVVDVSHEDPEVKFNWYVDGVEVHNAKTKPREEQYNSTYRVVSVLTVLHQDWLNGKEYKCKVSNKALPAPIEKTISKAKGQPREPQVYTLPPSREEMTKNQVSLTCLVKGFYPSDIAVEWESNGQPENNYKTTPPVLDSDGSFFLYSKLTVDKSRWQQGNVFSCSVMHEALHNHYTQKSLSLSPGK

SEQ ID NO: 151 - DNA, 1113 bp, Zika virus
atggagacagacacactcctgctatgggtactgctgctctgggttccaggttccactggtgacacgcgtgtgtcctactccctgtgcaccgccgccttcaccttcaccaagatccccgccgagaccctgcacggcaccgtgaccgtggaggtgcagtacgccggcaccgacggcccctgcaaggtgcccgcccagatggccgtggacatgcagaccctgacccccgtgggccgcctgatcaccgccaaccccgtgatcaccgagtccaccgagaactccaagatgatgctggagctggacccccccttcggcgactcctacatcgtgatcggcgtgggcgagaagaagatcacccaccactggcaccgctccggctccaccatcgactacaaggacgacgacgacaaggtcgacgagcccaaatcttgtgacaaaactcacacatgcccaccgtgcccagcacctgaactcctggggggaccgtcagtcttcctcttccccccaaaacccaaggacaccctcatgatctcccggacccctgaggtcacatgcgtggtggtggacgtgagccacgaagaccctgaggtcaagttcaactggtacgtggacggcgtggaggtgcataatgccaagacaaagccgcgggaggagcagtacaacagcacgtaccgtgtggtcagcgtcctcaccgtcctgcaccaggactggctgaatggcaaggagtacaagtgcaaggtctccaacaaagccctcccagcccccatcgagaaaaccatctccaaagccaaagggcagccccgagaaccacaggtgtacaccctgcccccatcccgggaggagatgaccaagaaccaggtcagcctgacctgcctggtcaaaggcttctatcccagcgacatcgccgtggagtgggagagcaatgggcagccggagaacaactacaagaccacgcctcccgtgctggactccgacggctccttcttcctctatagcaagctcaccgtggacaagagcaggtggcagcaggggaacgtcttctcatgctccgtgatgcatgaggctctgcacaaccactacacgcagaagagcctctccctgtctccgggtaaatga

SEQ ID NO: 152 - protein, 370 aa, Zika virus
METDTLLLWVLLLWVPGSTGDTRVSYSLCTAAFTFTKIPAETLHGTVTVEVQYAGTDGPCKVPAQMAVDMQTLTPVGRLITANPVITESTENSKMMLELDPPFGDSYIVIGVGEKKITHHWHRSGSTIDYKDDDDKVDEPKSCDKTHTCPPCPAPELLGGPSVFLFPPKPKDTLMISRTPEVTCVVVDVSHEDPEVKFNWYVDGVEVHNAKTKPREEQYNSTYRVVSVLTVLHQDWLNGKEYKCKVSNKALPAPIEKTISKAKGQPREPQVYTLPPSREEMTKNQVSLTCLVKGFYPSDIAVEWESNGQPENNYKTTPPVLDSDGSFFLYSKLTVDKSRWQQGNVFSCSVMHEALHNHYTQKSLSLSPGK

SEQ ID NO: 153 - DNA, 1059 bp, Zika virus
atggagacagacacactcctgctatgggtactgctgctctgggttccaggttccactggtgacacgcgtatctccgacatggcctccgactcccgctgccccacccagggcgaggcctacctggacaagcagtccgacacccagtacgtgtgcaagcgcaccctggtggaccgcggctggggcaacggctgcggcctgttcggcaagggctccctggtgacctgcgccaagttcgcctgctccaagaagatgaccggcaagtccatccagcccgagaacctggagtaccgcatcatgctgtccgtgcacggctcccagcactccggcatggactacaaggacgacgacgacaaggtcgacgagcccaaatcttgtgacaaaactcacacatgcccaccgtgcccagcacctgaactcctggggggaccgtcagtcttcctcttccccccaaaacccaaggacaccctcatgatctcccggacccctgaggtcacatgcgtggtggtggacgtgagccacgaagaccctgaggtcaagttcaactggtacgtggacggcgtggaggtgcataatgccaagacaaagccgcgggaggagcagtacaacagcacgtaccgtgtggtcagcgtcctcaccgtcctgcaccaggactggctgaatggcaaggagtacaagtgcaaggtctccaacaaagccctcccagcccccatcgagaaaaccatctccaaagccaaagggcagccccgagaaccacaggtgtacaccctgcccccatcccgggaggagatgaccaagaaccaggtcagcctgacctgcctggtcaaaggcttctatcccagcgacatcgccgtggagtgggagagcaatgggcagccggagaacaactacaagaccacgcctcccgtgctggactccgacggctccttcttcctctatagcaagctcaccgtggacaagagcaggtggcagcaggggaacgtcttctcatgctccgtgatgcatgaggctctgcacaaccactacacgcagaagagcctctccctgtctccgggtaaatga

SEQ ID NO: 154 - protein, 352 aa, Zika virus
METDTLLLWVLLLWVPGSTGDTRISDMASDSRCPTQGEAYLDKQSDTQYVCKRTLVDRGWGNGCGLFGKGSLVTCAKFACSKKMTGKSIQPENLEYRIMLSVHGSQHSGMDYKDDDDKVDEPKSCDKTHTCPPCPAPELLGGPSVFLFPPKPKDTLMISRTPEVTCVVVDVSHEDPEVKFNWYVDGVEVHNAKTKPREEQYNSTYRVVSVLTVLHQDWLNGKEYKCKVSNKALPAPIEKTISKAKGQPREPQVYTLPPSREEMTKNQVSLTCLVKGFYPSDIAVEWESNGQPENNYKTTPPVLDSDGSFFLYSKLTVDKSRWQQGNVFSCSVMHEALHNHYTQKSLSLSPGK

SEQ ID NO: 155 - DNA, 1023 bp, Zika virus
atggagacagacacactcctgctatgggtactgctgctctgggttccaggttccactggtgacacgcgtatcgtgaacgacactggacacgagactgatgagaatcgagctaaggttgaaattactccaaactccccccgagctgaggctacactggggggattcggaagtcttgggcttgattgcgagccaagaaccgggcttgacttctcagacttgtactatctgacaatgaacaataagcattggcttgttcacaaggagtggttccacgatataccattgccttggcacgactacaaggacgacgacgacaaggtcgacgagcccaaatcttgtgacaaaactcacacatgcccaccgtgcccagcacctgaactcctggggggaccgtcagtcttcctcttccccccaaaacccaaggacaccctcatgatctcccggacccctgaggtcacatgcgtggtggtggacgtgagccacgaagaccctgaggtcaagttcaactggtacgtggacggcgtggaggtgcataatgccaagacaaagccgcgggaggagcagtacaacagcacgtaccgtgtggtcagcgtcctcaccgtcctgcaccaggactggctgaatggcaaggagtacaagtgcaaggtctccaacaaagccctcccagcccccatcgagaaaaccatctccaaagccaaagggcagccccgagaaccacaggtgtacaccctgcccccatcccgggaggagatgaccaagaaccaggtcagcctgacctgcctggtcaaaggcttctatcccagcgacatcgccgtggagtgggagagcaatgggcagccggagaacaactacaagaccacgcctcccgtgctggactccgacggctccttcttcctctatagcaagctcaccgtggacaagagcaggtggcagcaggggaacgtcttctcatgctccgtgatgcatgaggctctgcacaaccactacacgcagaagagcctctccctgtctccgggtaaatga

SEQ ID NO: 156 - protein, 340 aa, Zika virus
METDTLLLWVLLLWVPGSTGDTRIVNDTGHETDENRAKVEITPNSPRAEATLGGFGSLGLDCEPRTGLDFSDLYYLTMNNKHWLVHKEWFHDIPLPWHDYKDDDDKVDEPKSCDKTHTCPPCPAPELLGGPSVFLFPPKPKDTLMISRTPEVTCVVVDVSHEDPEVKFNWYVDGVEVHNAKTKPREEQYNSTYRVVSVLTVLHQDWLNGKEYKCKVSNKALPAPIEKTISKAKGQPREPQVYTLPPSREEMTKNQVSLTCLVKGFYPSDIAVEWESNGQPENNYKTTPPVLDSDGSFFLYSKLTVDKSRWQQGNVFSCSVMHEALHNHYTQKSLSLSPGK

SEQ ID NO: 157 - DNA, 2037 bp, Zika virus
atggagacagacacactcctgctatgggtactgctgctctgggttccaggttccactggtgacacgcgtcatcaccatcaccatcaccgctgtataggggtcagcaatagggatttcgttgagggcatgtccggtggaacatgggtggatatagtcctggaacatggagggtgcgttacagttatggctcaagataaacccaccgtagatattgaattggtgacaaccacagtgtctaacatggccgaagttcggagctattgttatgaagccagtatcagcgacatggcttccgattcacgctgcccaacccagggtgaagcctacttggataagcaaagcgatacacaatatgtctgcaagcgaaccctggtagatcgagggtgggggaatggctgcgggttgttcggcaagggatctctcgtcacatgcgccaaatttgcatgcagtaagaaaatgaccggaaaatccatacagcccgagaacctggaatatcggatcatgctctctgtccacggaagtcagcattccggtatgatcgtgaatgacaccgggcatgagaccgacgaaaacagggccaaagtcgagattacccccaattctccccgcgcagaggcaaccctcggaggatttggaagcctgggactggactgtgaaccaaggactggactcgacttcagcgacctctattatctcacaatgaataataagcactggcttgtacataaagaatggtttcacgacattcctcttccctggcacgccggggccgacacaggaacaccacactggaataacaaagaagctcttgtggagttcaaagacgctcacgcaaagcgccaaaccgtagtggtgctgggcagccaagaaggagccgttcacacagccttggctggggcattggaggctgaaatggacggagccaaggggcggctctcaagtggacaccttaagtgccgcctgaaaatggataagctgagattgaagggcgtatcttattccctgtgtacagccgcatttacttttactaagattcctgccgaaacccttcacgggacagtaactgtagaggtacagtacgcagggactgacggtccttgcaaagtacccgcacaaatggccgtagacatgcaaaccctcactcctgttgggcgactgatcaccgctaacccagttataactgagtccaccgaaaactccaaaatgatgcttgagttggaccctcctttcggtgacagttatatcgttataggcgtgggggaaaagaagattactcaccattggcaccgcagcggtagtactatcgactacaaggacgacgacgacaaggtcgacgagcccagagggcccacaatcaagccctgtcctccatgcaaatgcccagcacctaacctcttgggtggaccatccgtcttcatcttccctccaaagatcaaggatgtactcatgatctccctgagccccatagtcacatgtgtggtggtggatgtgagcgaggatgacccagatgtccagatcagctggtttgtgaacaacgtggaagtacacacagctcagacacaaacccatagagaggattacaacagtactctccgggtggtcagtgccctccccatccagcaccaggactggatgagtggcaaggagttcaaatgcaaggtcaacaacaaagacctcccagcgcccatcgagagaaccatctcaaaacccaaagggtcagtaagagctccacaggtatatgtcttgcctccaccagaagaagagatgactaagaaacaggtcactctgacctgcatggtcacagacttcatgcctgaagacatttacgtggagtggaccaacaacgggaaaacagagctaaactacaagaacactgaaccagtcctggactctgatggttcttacttcatgtacagcaagctgagagtggaaaagaagaactgggtggaaagaaatagctactcctgttcagtggtccacgagggtctgcacaatcaccacacgactaagagcttctcccggactccgggtaaatag

SEQ ID NO: 158 - protein, 678 aa, Zika virus
METDTLLLWVLLLWVPGSTGDTRHHHHHHRCIGVSNRDFVEGMSGGTWVDIVLEHGGCVTVMAQDKPTVDIELVTTTVSNMAEVRSYCYEASISDMASDSRCPTQGEAYLDKQSDTQYVCKRTLVDRGWGNGCGLFGKGSLVTCAKFACSKKMTGKSIQPENLEYRIMLSVHGSQHSGMIVNDTGHETDENRAKVEITPNSPRAEATLGGFGSLGLDCEPRTGLDFSDLYYLTMNNKHWLVHKEWFHDIPLPWHAGADTGTPHWNNKEALVEFKDAHAKRQTVVVLGSQEGAVHTALAGALEAEMDGAKGRLSSGHLKCRLKMDKLRLKGVSYSLCTAAFTFTKIPAETLHGTVTVEVQYAGTDGPCKVPAQMAVDMQTLTPVGRLITANPVITESTENSKMMLELDPPFGDSYIVIGVGEKKITHHWHRSGSTIDYKDDDDKVDEPRGPTIKPCPPCKCPAPNLLGGPSVFIFPPKIKDVLMISLSPIVTCVVVDVSEDDPDVQISWFVNNVEVHTAQTQTHREDYNSTLRVVSALPIQHQDWMSGKEFKCKVNNKDLPAPIERTISKPKGSVRAPQVYVLPPPEEEMTKKQVTLTCMVTDFMPEDIYVEWTNNGKTELNYKNTEPVLDSDGSYFMYSKLRVEKKNWVERNSYSCSVVHEGLHNHHTTKSFSRTPGK

SEQ ID NO: 159 - DNA, 1134 bp, Zika virus
atggagacagacacactcctgctatgggtactgctgctctgggttccaggttccactggtgacacgcgtcatcaccatcaccatcacgtgtcctactccctgtgcaccgccgccttcaccttcaccaagatccccgccgagaccctgcacggcaccgtgaccgtggaggtgcagtacgccggcaccgacggcccctgcaaggtgcccgcccagatggccgtggacatgcagaccctgacccccgtgggccgcctgatcaccgccaaccccgtgatcaccgagtccaccgagaactccaagatgatgctggagctggacccccccttcggcgactcctacatcgtgatcggcgtgggcgagaagaagatcacccaccactggcaccgctccggctccaccatcgactacaaggacgacgacgacaaggtcgacgagcccagagggcccacaatcaagccctgtcctccatgcaaatgcccagcacctaacctcttgggtggaccatccgtcttcatcttccctccaaagatcaaggatgtactcatgatctccctgagccccatagtcacatgtgtggtggtggatgtgagcgaggatgacccagatgtccagatcagctggtttgtgaacaacgtggaagtacacacagctcagacacaaacccatagagaggattacaacagtactctccgggtggtcagtgccctccccatccagcaccaggactggatgagtggcaaggagttcaaatgcaaggtcaacaacaaagacctcccagcgcccatcgagagaaccatctcaaaacccaaagggtcagtaagagctccacaggtatatgtcttgcctccaccagaagaagagatgactaagaaacaggtcactctgacctgcatggtcacagacttcatgcctgaagacatttacgtggagtggaccaacaacgggaaaacagagctaaactacaagaacactgaaccagtcctggactctgatggttcttacttcatgtacagcaagctgagagtggaaaagaagaactgggtggaaagaaatagctactcctgttcagtggtccacgagggtctgcacaatcaccacacgactaagagcttctcccggactccgggtaaatag

SEQ ID NO: 160 - protein, 377 aa, Zika virus
METDTLLLWVLLLWVPGSTGDTRHHHHHHVSYSLCTAAFTFTKIPAETLHGTVTVEVQYAGTDGPCKVPAQMAVDMQTLTPVGRLITANPVITESTENSKMMLELDPPFGDSYIVIGVGEKKITHHWHRSGSTIDYKDDDDKVDEPRGPTIKPCPPCKCPAPNLLGGPSVFIFPPKIKDVLMISLSPIVTCVVVDVSEDDPDVQISWFVNNVEVHTAQTQTHREDYNSTLRVVSALPIQHQDWMSGKEFKCKVNNKDLPAPIERTISKPKGSVRAPQVYVLPPPEEEMTKKQVTLTCMVTDFMPEDIYVEWTNNGKTELNYKNTEPVLDSDGSYFMYSKLRVEKKNWVERNSYSCSVVHEGLHNHHTTKSFSRTPGK

SEQ ID NO: 161 - DNA, 1080 bp, Zika virus
atggagacagacacactcctgctatgggtactgctgctctgggttccaggttccactggtgacacgcgtcatcaccatcaccatcacatctccgacatggcctccgactcccgctgccccacccagggcgaggcctacctggacaagcagtccgacacccagtacgtgtgcaagcgcaccctggtggaccgcggctggggcaacggctgcggcctgttcggcaagggctccctggtgacctgcgccaagttcgcctgctccaagaagatgaccggcaagtccatccagcccgagaacctggagtaccgcatcatgctgtccgtgcacggctcccagcactccggcatggactacaaggacgacgacgacaaggtcgacgagcccagagggcccacaatcaagccctgtcctccatgcaaatgcccagcacctaacctcttgggtggaccatccgtcttcatcttccctccaaagatcaaggatgtactcatgatctccctgagccccatagtcacatgtgtggtggtggatgtgagcgaggatgacccagatgtccagatcagctggtttgtgaacaacgtggaagtacacacagctcagacacaaacccatagagaggattacaacagtactctccgggtggtcagtgccctccccatccagcaccaggactggatgagtggcaaggagttcaaatgcaaggtcaacaacaaagacctcccagcgcccatcgagagaaccatctcaaaacccaaagggtcagtaagagctccacaggtatatgtcttgcctccaccagaagaagagatgactaagaaacaggtcactctgacctgcatggtcacagacttcatgcctgaagacatttacgtggagtggaccaacaacgggaaaacagagctaaactacaagaacactgaaccagtcctggactctgatggttcttacttcatgtacagcaagctgagagtggaaaagaagaactgggtggaaagaaatagctactcctgttcagtggtccacgagggtctgcacaatcaccacacgactaagagcttctcccggactccgggtaaatag

SEQ ID NO: 162 - protein, 359 aa, Zika virus
METDTLLLWVLLLWVPGSTGDTRHHHHHHISDMASDSRCPTQGEAYLDKQSDTQYVCKRTLVDRGWGNGCGLFGKGSLVTCAKFACSKKMTGKSIQPENLEYRIMLSVHGSQHSGMDYKDDDDKVDEPRGPTIKPCPPCKCPAPNLLGGPSVFIFPPKIKDVLMISLSPIVTCVVVDVSEDDPDVQISWFVNNVEVHTAQTQTHREDYNSTLRVVSALPIQHQDWMSGKEFKCKVNNKDLPAPIERTISKPKGSVRAPQVYVLPPPEEEMTKKQVTLTCMVTDFMPEDIYVEWTNNGKTELNYKNTEPVLDSDGSYFMYSKLRVEKKNWVERNSYSCSVVHEGLHNHHTTKSFSRTPGK

SEQ ID NO: 163 - DNA, 1044 bp, Zika virus
atggagacagacacactcctgctatgggtactgctgctctgggttccaggttccactggtgacacgcgtcatcaccatcaccatcacatcgtgaacgacactggacacgagactgatgagaatcgagctaaggttgaaattactccaaactccccccgagctgaggctacactggggggattcggaagtcttgggcttgattgcgagccaagaaccgggcttgacttctcagacttgtactatctgacaatgaacaataagcattggcttgttcacaaggagtggttccacgatataccattgccttggcacgactacaaggacgacgacgacaaggtcgacgagcccagagggcccacaatcaagccctgtcctccatgcaaatgcccagcacctaacctcttgggtggaccatccgtcttcatcttccctccaaagatcaaggatgtactcatgatctccctgagccccatagtcacatgtgtggtggtggatgtgagcgaggatgacccagatgtccagatcagctggtttgtgaacaacgtggaagtacacacagctcagacacaaacccatagagaggattacaacagtactctccgggtggtcagtgccctccccatccagcaccaggactggatgagtggcaaggagttcaaatgcaaggtcaacaacaaagacctcccagcgcccatcgagagaaccatctcaaaacccaaagggtcagtaagagctccacaggtatatgtcttgcctccaccagaagaagagatgactaagaaacaggtcactctgacctgcatggtcacagacttcatgcctgaagacatttacgtggagtggaccaacaacgggaaaacagagctaaactacaagaacactgaaccagtcctggactctgatggttcttacttcatgtacagcaagctgagagtggaaaagaagaactgggtggaaagaaatagctactcctgttcagtggtccacgagggtctgcacaatcaccacacgactaagagcttctcccggactccgggtaaatag

SEQ ID NO: 164 - protein, 347 aa, Zika virus
METDTLLLWVLLLWVPGSTGDTRHHHHHHIVNDTGHETDENRAKVEITPNSPRAEATLGGFGSLGLDCEPRTGLDFSDLYYLTMNNKHWLVHKEWFHDIPLPWHDYKDDDDKVDEPRGPTIKPCPPCKCPAPNLLGGPSVFIFPPKIKDVLMISLSPIVTCVVVDVSEDDPDVQISWFVNNVEVHTAQTQTHREDYNSTLRVVSALPIQHQDWMSGKEFKCKVNNKDLPAPIERTISKPKGSVRAPQVYVLPPPEEEMTKKQVTLTCMVTDFMPEDIYVEWTNNGKTELNYKNTEPVLDSDGSYFMYSKLRVEKKNWVERNSYSCSVVHEGLHNHHTTKSFSRTPGK

SEQ ID NO: 165 - DNA, 429 bp, Zika virus
atggagacagacacactcctgctatgggtactgctgctctgggttccaggttccactggtgacacgcgtcatcaccatcaccatcacgactacaaggacgacgacgacaaggtgtcctactccctgtgcaccgccgccttcaccttcaccaagatccccgccgagaccctgcacggcaccgtgaccgtggaggtgcagtacgccggcaccgacggcccctgcaaggtgcccgcccagatggccgtggacatgcagaccctgacccccgtgggccgcctgatcaccgccaaccccgtgatcaccgactccaccgataactccaagatgatgctggagctggacccccccttcggcgactcctacatcgtgatcggcgtgggcgagaagaagatcacccaccactggcaccgctccggctccaccatctag

SEQ ID NO: 166 - protein, 142 aa, Zika virus
METDTLLLWVLLLWVPGSTGDTRHHHHHHDYKDDDDKVSYSLCTAAFTFTKIPAETLHGTVTVEVQYAGTDGPCKVPAQMAVDMQTLTPVGRLITANPVITDSTDNSKMMLELDPPFGDSYIVIGVGEKKITHHWHRSGSTI

SEQ ID NO: 167 - DNA, 1113 bp, Zika virus
atggagacagacacactcctgctatgggtactgctgctctgggttccaggttccactggtgacacgcgtgtgtcctactccctgtgcaccgccgccttcaccttcaccaagatccccgccgagaccctgcacggcaccgtgaccgtggaggtgcagtacgccggcaccgacggcccctgcaaggtgcccgcccagatggccgtggacatgcagaccctgacccccgtgggccgcctgatcaccgccaaccccgtgatcaccgactccaccgataactccaagatgatgctggagctggacccccccttcggcgactcctacatcgtgatcggcgtgggcgagaagaagatcacccaccactggcaccgctccggctccaccatcgactacaaggacgacgacgacaaggtcgacgagcccaaatcttgtgacaaaactcacacatgcccaccgtgcccagcacctgaactcctggggggaccgtcagtcttcctcttccccccaaaacccaaggacaccctcatgatctcccggacccctgaggtcacatgcgtggtggtggacgtgagccacgaagaccctgaggtcaagttcaactggtacgtggacggcgtggaggtgcataatgccaagacaaagccgcgggaggagcagtacaacagcacgtaccgtgtggtcagcgtcctcaccgtcctgcaccaggactggctgaatggcaaggagtacaagtgcaaggtctccaacaaagccctcccagcccccatcgagaaaaccatctccaaagccaaagggcagccccgagaaccacaggtgtacaccctgcccccatcccgggaggagatgaccaagaaccaggtcagcctgacctgcctggtcaaaggcttctatcccagcgacatcgccgtggagtgggagagcaatgggcagccggagaacaactacaagaccacgcctcccgtgctggactccgacggctccttcttcctctatagcaagctcaccgtggacaagagcaggtggcagcaggggaacgtcttctcatgctccgtgatgcatgaggctctgcacaaccactacacgcagaagagcctctccctgtctccgggtaaatga

SEQ ID NO: 168 - protein, 370 aa, Zika virus
METDTLLLWVLLLWVPGSTGDTRVSYSLCTAAFTFTKIPAETLHGTVTVEVQYAGTDGPCKVPAQMAVDMQTLTPVGRLITANPVITDSTDNSKMMLELDPPFGDSYIVIGVGEKKITHHWHRSGSTIDYKDDDDKVDEPKSCDKTHTCPPCPAPELLGGPSVFLFPPKPKDTLMISRTPEVTCVVVDVSHEDPEVKFNWYVDGVEVHNAKTKPREEQYNSTYRVVSVLTVLHQDWLNGKEYKCKVSNKALPAPIEKTISKAKGQPREPQVYTLPPSREEMTKNQVSLTCLVKGFYPSDIAVEWESNGQPENNYKTTPPVLDSDGSFFLYSKLTVDKSRWQQGNVFSCSVMHEALHNHYTQKSLSLSPGK

SEQ ID NO: 169 - DNA, 1134 bp, Zika virus
atggagacagacacactcctgctatgggtactgctgctctgggttccaggttccactggtgacacgcgtcatcaccatcaccatcacgtgtcctactccctgtgcaccgccgccttcaccttcaccaagatccccgccgagaccctgcacggcaccgtgaccgtggaggtgcagtacgccggcaccgacggcccctgcaaggtgcccgcccagatggccgtggacatgcagaccctgacccccgtgggccgcctgatcaccgccaaccccgtgatcaccgactccaccgataactccaagatgatgctggagctggacccccccttcggcgactcctacatcgtgatcggcgtgggcgagaagaagatcacccaccactggcaccgctccggctccaccatcgactacaaggacgacgacgacaaggtcgacgagcccagagggcccacaatcaagccctgtcctccatgcaaatgcccagcacctaacctcttgggtggaccatccgtcttcatcttccctccaaagatcaaggatgtactcatgatctccctgagccccatagtcacatgtgtggtggtggatgtgagcgaggatgacccagatgtccagatcagctggtttgtgaacaacgtggaagtacacacagctcagacacaaacccatagagaggattacaacagtactctccgggtggtcagtgccctccccatccagcaccaggactggatgagtggcaaggagttcaaatgcaaggtcaacaacaaagacctcccagcgcccatcgagagaaccatctcaaaacccaaagggtcagtaagagctccacaggtatatgtcttgcctccaccagaagaagagatgactaagaaacaggtcactctgacctgcatggtcacagacttcatgcctgaagacatttacgtggagtggaccaacaacgggaaaacagagctaaactacaagaacactgaaccagtcctggactctgatggttcttacttcatgtacagcaagctgagagtggaaaagaagaactgggtggaaagaaatagctactcctgttcagtggtccacgagggtctgcacaatcaccacacgactaagagcttctcccggactccgggtaaatag

SEQ ID NO: 170 - protein, 377 aa, Zika virus
METDTLLLWVLLLWVPGSTGDTRHHHHHHVSYSLCTAAFTFTKIPAETLHGTVTVEVQYAGTDGPCKVPAQMAVDMQTLTPVGRLITANPVITDSTDNSKMMLELDPPFGDSYIVIGVGEKKITHHWHRSGSTIDYKDDDDKVDEPRGPTIKPCPPCKCPAPNLLGGPSVFIFPPKIKDVLMISLSPIVTCVVVDVSEDDPDVQISWFVNNVEVHTAQTQTHREDYNSTLRVVSALPIQHQDWMSGKEFKCKVNNKDLPAPIERTISKPKGSVRAPQVYVLPPPEEEMTKKQVTLTCMVTDFMPEDIYVEWTNNGKTELNYKNTEPVLDSDGSYFMYSKLRVEKKNWVERNSYSCSVVHEGLHNHHTTKSFSRTPGK

SEQ ID NO: 171 - DNA, 216 bp, Zika virus
atggagacagacacactcctgctatgggtactgctgctctgggttccaggttccactggtgacacgcgtcatcaccatcaccatcacgactacaaggacgacgacgacaagggccgcctgatcaccgccaaccccgtgatcaccgagtccaccgagaactccaagatgatgctggagctggacccccccttcggcgactcctacatcggcgagtag

SEQ ID NO: 172 - protein, 71 aa, Zika virus
METDTLLLWVLLLWVPGSTGDTRHHHHHHDYKDDDDKGRLITANPVITESTENSKMMLELDPPFGDSYIGE

SEQ ID NO: 173 - DNA, 312 bp, Homo sapiens
atgctgggcaacaagcgcctgggcctgtccggcctgaccctggccctgtccctgctggtgtgcctgggcgccctggccgaggcccatcaccatcaccatcactacccctccaagcccgacaaccccggcgaggacgcccccgccgaggacatggcccgctactactccgccctgcgccactacatcaacctgatcacccgccagcgctacggcaagcgctcctcccccgagaccctgatctccgacctgctgatgcgcgagtccaccgagaacgtgccccgcacccgcctggaggaccccgccatgtggtag

SEQ ID NO: 174 - protein, 103 aa, Homo sapiens
MLGNKRLGLSGLTLALSLLVCLGALAEAHHHHHHYPSKPDNPGEDAPAEDMARYYSALRHYINLITRQRYGKRSSPETLISDLLMRESTENVPRTRLEDPAMW

SEQ ID NO: 175 - DNA, 312 bp, Homo sapiens
atgctgggcaacaagcgcctgggcctgtccggcctgaccctggccctgtccctgctggtgtgcctgggcgccctggccgaggcccatcaccatcaccatcactacccctccaagcccgacaacccccccgacgccgagggcgccgaggacatggcccgctactactccgccctgcgccactacatcaacctgatcacccgccagcgctacggcaagcgctcctcccccgagaccctgatctccgacctgctgatgcgcgagtccaccgagaacgtgccccgcacccgcctggaggaccccgccatgtggtag

SEQ ID NO: 176 - protein, 103 aa, Homo sapiens
MLGNKRLGLSGLTLALSLLVCLGALAEAHHHHHHYPSKPDNPPDAEGAEDMARYYSALRHYINLITRQRYGKRSSPETLISDLLMRESTENVPRTRLEDPAMW

SEQ ID NO: 177 - DNA, 312 bp, Homo sapiens
atgctgggcaacaagcgcctgggcctgtccggcctgaccctggccctgtccctgctggtgtgcctgggcgccctggccgaggcccatcaccatcaccatcactacccctccaagcccgacaaccccggcgaggacgcccccgccgaggacatggcccgctactactccgccctgcgccactacatcaacctgatcacccgccagcgctacggcaagcgctcctcccccgagaccctgatctccgacctgctgatgcgcaacacctccgaggaggtgccccgcacccgcctggaggaccccgccatgtggtag

SEQ ID NO: 178 - protein, 103 aa, Homo sapiens
MLGNKRLGLSGLTLALSLLVCLGALAEAHHHHHHYPSKPDNPGEDAPAEDMARYYSALRHYINLITRQRYGKRSSPETLISDLLMRNTSEEVPRTRLEDPAMW

SEQ ID NO: 179 - DNA, 312 bp, Homo sapiens
atgctgggcaacaagcgcctgggcctgtccggcctgaccctggccctgtccctgctggtgtgcctgggcgccctggccgaggcccatcaccatcaccatcactacccctccaagcccgacaacccccccgacgccgagggcgccgaggacatggcccgctactactccgccctgcgccactacatcaacctgatcacccgccagcgctacggcaagcgctcctcccccgagaccctgatctccgacctgctgatgcgctccaccaacgacgacgtgccccgcacccgcctggaggaccccgccatgtggtag

SEQ ID NO: 180 - protein, 103 aa, Homo sapiens
MLGNKRLGLSGLTLALSLLVCLGALAEAHHHHHHYPSKPDNPPDAEGAEDMARYYSALRHYINLITRQRYGKRSSPETLISDLLMRSTNDDVPRTRLEDPAMW

SEQ ID NO: 181 - DNA, 342 bp, Homo sapiens
atgctgggcaacaagcgcctgggcctgtccggcctgaccctggccctgtccctgctggtgtgcctgggcgccctggccgaggcccatcaccatcaccatcactacccctccaagcccgacaacccccccgacgccgagggcgccgaggacatggcccgctactactccgccctgcgccactacatcaacctgatcacccgccagcgctacggcaagcgctcctcccccgagaccctgatctccgacctgctgatgcgctccaaggacgtgcagctgaagaacatcaccgactacatgtacctggtgccccgcacccgcctggaggaccccgccatgtggtag

SEQ ID NO: 182 - protein, 113 aa, Homo sapiens
MLGNKRLGLSGLTLALSLLVCLGALAEAHHHHHHYPSKPDNPPDAEGAEDMARYYSALRHYINLITRQRYGKRSSPETLISDLLMRSKDVQLKNITDYMYLVPRTRLEDPAMW

SEQ ID NO: 183 - DNA, 429 bp, Zika virus
atggagacagacacactcctgctatgggtactgctgctctgggttccaggttccactggtgacacgcgtcatcaccatcaccatcacgactacaaggacgacgacgacaaggtgtcctactccctgtgcaccgccgccttcaccttcaccaagatccccgccgagaccctgcacggcaccgtgaccgtggaggtgcagtacgccggcaccgacggcccctgcaaggtgcccgcccagatggccgtggacatgcagaccctgacccccgtgggccgcctgatcaccgccaaccccgtgatcaccgactccaccgacaactccaagatgatgctggagctggacccccccttcggcgactcctacatcgtgatcggcgtgggcgagaagaagatcacccaccactggcaccgctccggctccaccatctag

SEQ ID NO: 184 - protein, 142 aa, Zika virus; identical to SEQ ID NO: 166

SEQ ID NO: 185 - DNA, 429 bp, Zika virus
atggagacagacacactcctgctatgggtactgctgctctgggttccaggttccactggtgacacgcgtcatcaccatcaccatcacgactacaaggacgacgacgacaaggtgtcctactccctgtgcaccgccgccttcaccttcaccaagatccccgccgagaccctgcacggcaccgtgaccgtggaggtgcagtacgccggcaccgacggcccctgcaaggtgcccgcccagatggccgtggacatgcagaccctgacccccgtgggccgcctgatcaccgccaaccccgtgatcaccgagacctccgagcagtccaagatgatgctggagctggacccccccttcggcgactcctacatcgtgatcggcgtgggcgagaagaagatcacccaccactggcaccgctccggctccaccatctag

SEQ ID NO: 186 - protein, 142 aa, Zika virus
METDTLLLWVLLLWVPGSTGDTRHHHHHHDYKDDDDKVSYSLCTAAFTFTKIPAETLHGTVTVEVQYAGTDGPCKVPAQMAVDMQTLTPVGRLITANPVITETSEQSKMMLELDPPFGDSYIVIGVGEKKITHHWHRSGSTI

SEQ ID NO: 187 - DNA, 429 bp, Zika virus
atggagacagacacactcctgctatgggtactgctgctctgggttccaggttccactggtgacacgcgtcatcaccatcaccatcacgactacaaggacgacgacgacaaggtgtcctactccctgtgcaccgccgccttcaccttcaccaagatccccgccgagaccctgcacggcaccgtgaccgtggaggtgcagtacgccggcaccgacggcccctgcaaggtgcccgcccagatggccgtggacatgcagaccctgacccccgtgggccgcctgatcaccgccaaccccgtgatcaccaagtccaccgagaactccaagatgatgctggagctggacccccccttcggcgactcctacatcgtgatcggcgtgggcgagaagaagatcacccaccactggcaccgctccggctccaccatctag

SEQ ID NO: 188 - protein, 142 aa, Zika virus
METDTLLLWVLLLWVPGSTGDTRHHHHHHDYKDDDDKVSYSLCTAAFTFTKIPAETLHGTVTVEVQYAGTDGPCKVPAQMAVDMQTLTPVGRLITANPVITKSTENSKMMLELDPPFGDSYIVIGVGEKKITHHWHRSGSTI

SEQ ID NO: 189 - DNA, 429 bp, Zika virus
atggagacagacacactcctgctatgggtactgctgctctgggttccaggttccactggtgacacgcgtcatcaccatcaccatcacgactacaaggacgacgacgacaaggtgtcctactccctgtgcaccgccgccttcaccttcaccaagatccccgccgagaccctgcacggcaccgtgaccgtggaggtgcagtacgccggcaccgacggcccctgcaaggtgcccgcccagatggccgtggacatgcagaccctgacccccgtgggccgcctgatcaccgccaaccccgtgatcaccaactccaccgaggagtccaagatgatgctggagctggacccccccttcggcgactcctacatcgtgatcggcgtgggcgagaagaagatcacccaccactggcaccgctccggctccaccatctag

SEQ ID NO: 190 - protein, 142 aa, Zika virus
METDTLLLWVLLLWVPGSTGDTRHHHHHHDYKDDDDKVSYSLCTAAFTFTKIPAETLHGTVTVEVQYAGTDGPCKVPAQMAVDMQTLTPVGRLITANPVITNSTEESKMMLELDPPFGDSYIVIGVGEKKITHHWHRSGSTI

SEQ ID NO: 191 - DNA, 429 bp, Zika virus
atggagacagacacactcctgctatgggtactgctgctctgggttccaggttccactggtgacacgcgtcatcaccatcaccatcacgactacaaggacgacgacgacaaggtgtcctactccctgtgcaccgccgccttcaccttcaccaagatccccgccgagaccctgcacggcaccgtgaccgtggaggtgcagtacgccggcaccgacggcccctgcaaggtgcccgcccagatggccgtggacatgcagaccctgacccccgtgggccgcctgatcaccgccaaccccgtgatcaccgactccaccgagaactccaagatgatgctggagctggacccccccttcggcgactcctacatcgtgatcggcgtgggcgagaagaagatcacccaccactggcaccgctccggctccaccatctag

SEQ ID NO: 192 - protein, 142 aa, Zika virus
METDTLLLWVLLLWVPGSTGDTRHHHHHHDYKDDDDKVSYSLCTAAFTFTKIPAETLHGTVTVEVQYAGTDGPCKVPAQMAVDMQTLTPVGRLITANPVITDSTENSKMMLELDPPFGDSYIVIGVGEKKITHHWHRSGSTI

SEQ ID NO: 193 - DNA, 429 bp, Zika virus
atggagacagacacactcctgctatgggtactgctgctctgggttccaggttccactggtgacacgcgtcatcaccatcaccatcacgactacaaggacgacgacgacaaggtgtcctactccctgtgcaccgccgccttcaccttcaccaagatccccgccgagaccctgcacggcaccgtgaccgtggaggtgcagtacgccggcaccgacggcccctgcaaggtgcccgcccagatggccgtggacatgcagaccctgacccccgtgggccgcctgatcaccgccaaccccgtgatcaccgagtccaccgagcagtccaagatgatgctggagctggacccccccttcggcgactcctacatcgtgatcggcgtgggcgagaagaagatcacccaccactggcaccgctccggctccaccatctag

SEQ ID NO: 194 - protein, 142 aa, Zika virus
METDTLLLWVLLLWVPGSTGDTRHHHHHHDYKDDDDKVSYSLCTAAFTFTKIPAETLHGTVTVEVQYAGTDGPCKVPAQMAVDMQTLTPVGRLITANPVITESTEQSKMMLELDPPFGDSYIVIGVGEKKITHHWHRSGSTI

SEQ ID NO: 195 - DNA, 429 bp, Zika virus
atggagacagacacactcctgctatgggtactgctgctctgggttccaggttccactggtgacacgcgtcatcaccatcaccatcacgactacaaggacgacgacgacaaggtgtcctactccctgtgcaccgccgccttcaccttcaccaagatccccgccgagaccctgcacggcaccgtgaccgtggaggtgcagtacgccggcaccgacggcccctgcaaggtgcccgcccagatggccgtggacatgcagaccctgacccccgtgggccgcctgatcaccgccaaccccgtgatcaccgagacctccgagaactccaagatgatgctggagctggacccccccttcggcgactcctacatcgtgatcggcgtgggcgagaagaagatcacccaccactggcaccgctccggctccaccatctag

SEQ ID NO: 196 - protein, 142 aa, Zika virus
METDTLLLWVLLLWVPGSTGDTRHHHHHHDYKDDDDKVSYSLCTAAFTFTKIPAETLHGTVTVEVQYAGTDGPCKVPAQMAVDMQTLTPVGRLITANPVITETSENSKMMLELDPPFGDSYIVIGVGEKKITHHWHRSGSTI

SEQ ID NO: 197 - DNA, 429 bp, Zika virus
atggagacagacacactcctgctatgggtactgctgctctgggttccaggttccactggtgacacgcgtcatcaccatcaccatcacgactacaaggacgacgacgacaaggtgtcctactccctgtgcaccgccgccttcaccttcaccaagatccccgccgagaccctgcacggcaccgtgaccgtggaggtgcagtacgccggcaccgacggcccctgcaaggtgcccgcccagatggccgtggacatgcagaccctgacccccgtgggccgcctgatcaccgccaaccccgtgatcacccgctccaccgagaactccaagatgatgctggagctggacccccccttcggcgactcctacatcgtgatcggcgtgggcgagaagaagatcacccaccactggcaccgctccggctccaccatctag

SEQ ID NO: 198 - protein, 142 aa, Zika virus
METDTLLLWVLLLWVPGSTGDTRHHHHHHDYKDDDDKVSYSLCTAAFTFTKIPAETLHGTVTVEVQYAGTDGPCKVPAQMAVDMQTLTPVGRLITANPVITRSTENSKMMLELDPPFGDSYIVIGVGEKKITHHWHRSGSTI

SEQ ID NO: 199 - DNA, 1113 bp, Zika virus
atggagacagacacactcctgctatgggtactgctgctctgggttccaggttccactggtgacacgcgtgtgtcctactccctgtgcaccgccgccttcaccttcaccaagatccccgccgagaccctgcacggcaccgtgaccgtggaggtgcagtacgccggcaccgacggcccctgcaaggtgcccgcccagatggccgtggacatgcagaccctgacccccgtgggccgcctgatcaccgccaaccccgtgatcaccgactccaccgacaactccaagatgatgctggagctggacccccccttcggcgactcctacatcgtgatcggcgtgggcgagaagaagatcacccaccactggcaccgctccggctccaccatcgactacaaggacgacgacgacaaggtcgacgagcccaaatcttgtgacaaaactcacacatgcccaccgtgcccagcacctgaactcctggggggaccgtcagtcttcctcttccccccaaaacccaaggacaccctcatgatctcccggacccctgaggtcacatgcgtggtggtggacgtgagccacgaagaccctgaggtcaagttcaactggtacgtggacggcgtggaggtgcataatgccaagacaaagccgcgggaggagcagtacaacagcacgtaccgtgtggtcagcgtcctcaccgtcctgcaccaggactggctgaatggcaaggagtacaagtgcaaggtctccaacaaagccctcccagcccccatcgagaaaaccatctccaaagccaaagggcagccccgagaaccacaggtgtacaccctgcccccatcccgggaggagatgaccaagaaccaggtcagcctgacctgcctggtcaaaggcttctatcccagcgacatcgccgtggagtgggagagcaatgggcagccggagaacaactacaagaccacgcctcccgtgctggactccgacggctccttcttcctctatagcaagctcaccgtggacaagagcaggtggcagcaggggaacgtcttctcatgctccgtgatgcatgaggctctgcacaaccactacacgcagaagagcctctccctgtctccgggtaaatga

SEQ ID NO: 200 - protein, 370 aa, Zika virus; identical to SEQ ID NO: 168

SEQ ID NO: 201 - DNA, 1113 bp, Zika virus
atggagacagacacactcctgctatgggtactgctgctctgggttccaggttccactggtgacacgcgtgtgtcctactccctgtgcaccgccgccttcaccttcaccaagatccccgccgagaccctgcacggcaccgtgaccgtggaggtgcagtacgccggcaccgacggcccctgcaaggtgcccgcccagatggccgtggacatgcagaccctgacccccgtgggccgcctgatcaccgccaaccccgtgatcaccgactccaccgagaactccaagatgatgctggagctggacccccccttcggcgactcctacatcgtgatcggcgtgggcgagaagaagatcacccaccactggcaccgctccggctccaccatcgactacaaggacgacgacgacaaggtcgacgagcccaaatcttgtgacaaaactcacacatgcccaccgtgcccagcacctgaactcctggggggaccgtcagtcttcctcttccccccaaaacccaaggacaccctcatgatctcccggacccctgaggtcacatgcgtggtggtggacgtgagccacgaagaccctgaggtcaagttcaactggtacgtggacggcgtggaggtgcataatgccaagacaaagccgcgggaggagcagtacaacagcacgtaccgtgtggtcagcgtcctcaccgtcctgcaccaggactggctgaatggcaaggagtacaagtgcaaggtctccaacaaagccctcccagcccccatcgagaaaaccatctccaaagccaaagggcagccccgagaaccacaggtgtacaccctgcccccatcccgggaggagatgaccaagaaccaggtcagcctgacctgcctggtcaaaggcttctatcccagcgacatcgccgtggagtgggagagcaatgggcagccggagaacaactacaagaccacgcctcccgtgctggactccgacggctccttcttcctctatagcaagctcaccgtggacaagagcaggtggcagcaggggaacgtcttctcatgctccgtgatgcatgaggctctgcacaaccactacacgcagaagagcctctccctgtctccgggtaaatga

SEQ ID NO: 202 - protein, 370 aa, Zika virus
METDTLLLWVLLLWVPGSTGDTRVSYSLCTAAFTFTKIPAETLHGTVTVEVQYAGTDGPCKVPAQMAVDMQTLTPVGRLITANPVITDSTENSKMMLELDPPFGDSYIVIGVGEKKITHHWHRSGSTIDYKDDDDKVDEPKSCDKTHTCPPCPAPELLGGPSVFLFPPKPKDTLMISRTPEVTCVVVDVSHEDPEVKFNWYVDGVEVHNAKTKPREEQYNSTYRVVSVLTVLHQDWLNGKEYKCKVSNKALPAPIEKTISKAKGQPREPQVYTLPPSREEMTKNQVSLTCLVKGFYPSDIAVEWESNGQPENNYKTTPPVLDSDGSFFLYSKLTVDKSRWQQGNVFSCSVMHEALHNHYTQKSLSLSPGK

SEQ ID NO: 203 - DNA, 1113 bp, Zika virus
atggagacagacacactcctgctatgggtactgctgctctgggttccaggttccactggtgacacgcgtgtgtcctactccctgtgcaccgccgccttcaccttcaccaagatccccgccgagaccctgcacggcaccgtgaccgtggaggtgcagtacgccggcaccgacggcccctgcaaggtgcccgcccagatggccgtggacatgcagaccctgacccccgtgggccgcctgatcaccgccaaccccgtgatcaccgagtccaccgagcagtccaagatgatgctggagctggacccccccttcggcgactcctacatcgtgatcggcgtgggcgagaagaagatcacccaccactggcaccgctccggctccaccatcgactacaaggacgacgacgacaaggtcgacgagcccaaatcttgtgacaaaactcacacatgcccaccgtgcccagcacctgaactcctggggggaccgtcagtcttcctcttccccccaaaacccaaggacaccctcatgatctcccggacccctgaggtcacatgcgtggtggtggacgtgagccacgaagaccctgaggtcaagttcaactggtacgtggacggcgtggaggtgcataatgccaagacaaagccgcgggaggagcagtacaacagcacgtaccgtgtggtcagcgtcctcaccgtcctgcaccaggactggctgaatggcaaggagtacaagtgcaaggtctccaacaaagccctcccagcccccatcgagaaaaccatctccaaagccaaagggcagccccgagaaccacaggtgtacaccctgcccccatcccgggaggagatgaccaagaaccaggtcagcctgacctgcctggtcaaaggcttctatcccagcgacatcgccgtggagtgggagagcaatgggcagccggagaacaactacaagaccacgcctcccgtgctggactccgacggctccttcttcctctatagcaagctcaccgtggacaagagcaggtggcagcaggggaacgtcttctcatgctccgtgatgcatgaggctctgcacaaccactacacgcagaagagcctctccctgtctccgggtaaatga

SEQ ID NO: 204 - protein, 370 aa, Zika virus
METDTLLLWVLLLWVPGSTGDTRVSYSLCTAAFTFTKIPAETLHGTVTVEVQYAGTDGPCKVPAQMAVDMQTLTPVGRLITANPVITESTEQSKMMLELDPPFGDSYIVIGVGEKKITHHWHRSGSTIDYKDDDDKVDEPKSCDKTHTCPPCPAPELLGGPSVFLFPPKPKDTLMISRTPEVTCVVVDVSHEDPEVKFNWYVDGVEVHNAKTKPREEQYNSTYRVVSVLTVLHQDWLNGKEYKCKVSNKALPAPIEKTISKAKGQPREPQVYTLPPSREEMTKNQVSLTCLVKGFYPSDIAVEWESNGQPENNYKTTPPVLDSDGSFFLYSKLTVDKSRWQQGNVFSCSVMHEALHNHYTQKSLSLSPGK

SEQ ID NO: 205 - DNA, 1113 bp, Zika virus
atggagacagacacactcctgctatgggtactgctgctctgggttccaggttccactggtgacacgcgtgtgtcctactccctgtgcaccgccgccttcaccttcaccaagatccccgccgagaccctgcacggcaccgtgaccgtggaggtgcagtacgccggcaccgacggcccctgcaaggtgcccgcccagatggccgtggacatgcagaccctgacccccgtgggccgcctgatcaccgccaaccccgtgatcaccgagacctccgagaactccaagatgatgctggagctggacccccccttcggcgactcctacatcgtgatcggcgtgggcgagaagaagatcacccaccactggcaccgctccggctccaccatcgactacaaggacgacgacgacaaggtcgacgagcccaaatcttgtgacaaaactcacacatgcccaccgtgcccagcacctgaactcctggggggaccgtcagtcttcctcttccccccaaaacccaaggacaccctcatgatctcccggacccctgaggtcacatgcgtggtggtggacgtgagccacgaagaccctgaggtcaagttcaactggtacgtggacggcgtggaggtgcataatgccaagacaaagccgcgggaggagcagtacaacagcacgtaccgtgtggtcagcgtcctcaccgtcctgcaccaggactggctgaatggcaaggagtacaagtgcaaggtctccaacaaagccctcccagcccccatcgagaaaaccatctccaaagccaaagggcagccccgagaaccacaggtgtacaccctgcccccatcccgggaggagatgaccaagaaccaggtcagcctgacctgcctggtcaaaggcttctatcccagcgacatcgccgtggagtgggagagcaatgggcagccggagaacaactacaagaccacgcctcccgtgctggactccgacggctccttcttcctctatagcaagctcaccgtggacaagagcaggtggcagcaggggaacgtcttctcatgctccgtgatgcatgaggctctgcacaaccactacacgcagaagagcctctccctgtctccgggtaaatga

SEQ ID NO: 206 - protein, 370 aa, Zika virus
METDTLLLWVLLLWVPGSTGDTRVSYSLCTAAFTFTKIPAETLHGTVTVEVQYAGTDGPCKVPAQMAVDMQTLTPVGRLITANPVITETSENSKMMLELDPPFGDSYIVIGVGEKKITHHWHRSGSTIDYKDDDDKVDEPKSCDKTHTCPPCPAPELLGGPSVFLFPPKPKDTLMISRTPEVTCVVVDVSHEDPEVKFNWYVDGVEVHNAKTKPREEQYNSTYRVVSVLTVLHQDWLNGKEYKCKVSNKALPAPIEKTISKAKGQPREPQVYTLPPSREEMTKNQVSLTCLVKGFYPSDIAVEWESNGQPENNYKTTPPVLDSDGSFFLYSKLTVDKSRWQQGNVFSCSVMHEALHNHYTQKSLSLSPGK

SEQ ID NO: 207 - DNA, 1113 bp, Zika virus
atggagacagacacactcctgctatgggtactgctgctctgggttccaggttccactggtgacacgcgtgtgtcctactccctgtgcaccgccgccttcaccttcaccaagatccccgccgagaccctgcacggcaccgtgaccgtggaggtgcagtacgccggcaccgacggcccctgcaaggtgcccgcccagatggccgtggacatgcagaccctgacccccgtgggccgcctgatcaccgccaaccccgtgatcaccgagacctccgagcagtccaagatgatgctggagctggacccccccttcggcgactcctacatcgtgatcggcgtgggcgagaagaagatcacccaccactggcaccgctccggctccaccatcgactacaaggacgacgacgacaaggtcgacgagcccaaatcttgtgacaaaactcacacatgcccaccgtgcccagcacctgaactcctggggggaccgtcagtcttcctcttccccccaaaacccaaggacaccctcatgatctcccggacccctgaggtcacatgcgtggtggtggacgtgagccacgaagaccctgaggtcaagttcaactggtacgtggacggcgtggaggtgcataatgccaagacaaagccgcgggaggagcagtacaacagcacgtaccgtgtggtcagcgtcctcaccgtcctgcaccaggactggctgaatggcaaggagtacaagtgcaaggtctccaacaaagccctcccagcccccatcgagaaaaccatctccaaagccaaagggcagccccgagaaccacaggtgtacaccctgcccccatcccgggaggagatgaccaagaaccaggtcagcctgacctgcctggtcaaaggcttctatcccagcgacatcgccgtggagtgggagagcaatgggcagccggagaacaactacaagaccacgcctcccgtgctggactccgacggctccttcttcctctatagcaagctcaccgtggacaagagcaggtggcagcaggggaacgtcttctcatgctccgtgatgcatgaggctctgcacaaccactacacgcagaagagcctctccctgtctccgggtaaatga

SEQ ID NO: 208 - protein, 370 aa, Zika virus
METDTLLLWVLLLWVPGSTGDTRVSYSLCTAAFTFTKIPAETLHGTVTVEVQYAGTDGPCKVPAQMAVDMQTLTPVGRLITANPVITETSEQSKMMLELDPPFGDSYIVIGVGEKKITHHWHRSGSTIDYKDDDDKVDEPKSCDKTHTCPPCPAPELLGGPSVFLFPPKPKDTLMISRTPEVTCVVVDVSHEDPEVKFNWYVDGVEVHNAKTKPREEQYNSTYRVVSVLTVLHQDWLNGKEYKCKVSNKALPAPIEKTISKAKGQPREPQVYTLPPSREEMTKNQVSLTCLVKGFYPSDIAVEWESNGQPENNYKTTPPVLDSDGSFFLYSKLTVDKSRWQQGNVFSCSVMHEALHNHYTQKSLSLSPGK

SEQ ID NO: 209 - DNA, 1113 bp, Zika virus
atggagacagacacactcctgctatgggtactgctgctctgggttccaggttccactggtgacacgcgtgtgtcctactccctgtgcaccgccgccttcaccttcaccaagatccccgccgagaccctgcacggcaccgtgaccgtggaggtgcagtacgccggcaccgacggcccctgcaaggtgcccgcccagatggccgtggacatgcagaccctgacccccgtgggccgcctgatcaccgccaaccccgtgatcaccaagtccaccgagaactccaagatgatgctggagctggacccccccttcggcgactcctacatcgtgatcggcgtgggcgagaagaagatcacccaccactggcaccgctccggctccaccatcgactacaaggacgacgacgacaaggtcgacgagcccaaatcttgtgacaaaactcacacatgcccaccgtgcccagcacctgaactcctggggggaccgtcagtcttcctcttccccccaaaacccaaggacaccctcatgatctcccggacccctgaggtcacatgcgtggtggtggacgtgagccacgaagaccctgaggtcaagttcaactggtacgtggacggcgtggaggtgcataatgccaagacaaagccgcgggaggagcagtacaacagcacgtaccgtgtggtcagcgtcctcaccgtcctgcaccaggactggctgaatggcaaggagtacaagtgcaaggtctccaacaaagccctcccagcccccatcgagaaaaccatctccaaagccaaagggcagccccgagaaccacaggtgtacaccctgcccccatcccgggaggagatgaccaagaaccaggtcagcctgacctgcctggtcaaaggcttctatcccagcgacatcgccgtggagtgggagagcaatgggcagccggagaacaactacaagaccacgcctcccgtgctggactccgacggctccttcttcctctatagcaagctcaccgtggacaagagcaggtggcagcaggggaacgtcttctcatgctccgtgatgcatgaggctctgcacaaccactacacgcagaagagcctctccctgtctccgggtaaatga

SEQ ID NO: 210 - protein, 370 aa, Zika virus
METDTLLLWVLLLWVPGSTGDTRVSYSLCTAAFTFTKIPAETLHGTVTVEVQYAGTDGPCKVPAQMAVDMQTLTPVGRLITANPVITKSTENSKMMLELDPPFGDSYIVIGVGEKKITHHWHRSGSTIDYKDDDDKVDEPKSCDKTHTCPPCPAPELLGGPSVFLFPPKPKDTLMISRTPEVTCVVVDVSHEDPEVKFNWYVDGVEVHNAKTKPREEQYNSTYRVVSVLTVLHQDWLNGKEYKCKVSNKALPAPIEKTISKAKGQPREPQVYTLPPSREEMTKNQVSLTCLVKGFYPSDIAVEWESNGQPENNYKTTPPVLDSDGSFFLYSKLTVDKSRWQQGNVFSCSVMHEALHNHYTQKSLSLSPGK

SEQ ID NO: 211 - DNA, 1113 bp, Zika virus
atggagacagacacactcctgctatgggtactgctgctctgggttccaggttccactggtgacacgcgtgtgtcctactccctgtgcaccgccgccttcaccttcaccaagatccccgccgagaccctgcacggcaccgtgaccgtggaggtgcagtacgccggcaccgacggcccctgcaaggtgcccgcccagatggccgtggacatgcagaccctgacccccgtgggccgcctgatcaccgccaaccccgtgatcaccaactccaccgaggagtccaagatgatgctggagctggacccccccttcggcgactcctacatcgtgatcggcgtgggcgagaagaagatcacccaccactggcaccgctccggctccaccatcgactacaaggacgacgacgacaaggtcgacgagcccaaatcttgtgacaaaactcacacatgcccaccgtgcccagcacctgaactcctggggggaccgtcagtcttcctcttccccccaaaacccaaggacaccctcatgatctcccggacccctgaggtcacatgcgtggtggtggacgtgagccacgaagaccctgaggtcaagttcaactggtacgtggacggcgtggaggtgcataatgccaagacaaagccgcgggaggagcagtacaacagcacgtaccgtgtggtcagcgtcctcaccgtcctgcaccaggactggctgaatggcaaggagtacaagtgcaaggtctccaacaaagccctcccagcccccatcgagaaaaccatctccaaagccaaagggcagccccgagaaccacaggtgtacaccctgcccccatcccgggaggagatgaccaagaaccaggtcagcctgacctgcctggtcaaaggcttctatcccagcgacatcgccgtggagtgggagagcaatgggcagccggagaacaactacaagaccacgcctcccgtgctggactccgacggctccttcttcctctatagcaagctcaccgtggacaagagcaggtggcagcaggggaacgtcttctcatgctccgtgatgcatgaggctctgcacaaccactacacgcagaagagcctctccctgtctccgggtaaatga

SEQ ID NO: 212 - protein, 370 aa, Zika virus
METDTLLLWVLLLWVPGSTGDTRVSYSLCTAAFTFTKIPAETLHGTVTVEVQYAGTDGPCKVPAQMAVDMQTLTPVGRLITANPVITNSTEESKMMLELDPPFGDSYIVIGVGEKKITHHWHRSGSTIDYKDDDDKVDEPKSCDKTHTCPPCPAPELLGGPSVFLFPPKPKDTLMISRTPEVTCVVVDVSHEDPEVKFNWYVDGVEVHNAKTKPREEQYNSTYRVVSVLTVLHQDWLNGKEYKCKVSNKALPAPIEKTISKAKGQPREPQVYTLPPSREEMTKNQVSLTCLVKGFYPSDIAVEWESNGQPENNYKTTPPVLDSDGSFFLYSKLTVDKSRWQQGNVFSCSVMHEALHNHYTQKSLSLSPGK

SEQ ID NO: 213 - DNA, 1113 bp, Zika virus
atggagacagacacactcctgctatgggtactgctgctctgggttccaggttccactggtgacacgcgtgtgtcctactccctgtgcaccgccgccttcaccttcaccaagatccccgccgagaccctgcacggcaccgtgaccgtggaggtgcagtacgccggcaccgacggcccctgcaaggtgcccgcccagatggccgtggacatgcagaccctgacccccgtgggccgcctgatcaccgccaaccccgtgatcacccgctccaccgagaactccaagatgatgctggagctggacccccccttcggcgactcctacatcgtgatcggcgtgggcgagaagaagatcacccaccactggcaccgctccggctccaccatcgactacaaggacgacgacgacaaggtcgacgagcccaaatcttgtgacaaaactcacacatgcccaccgtgcccagcacctgaactcctggggggaccgtcagtcttcctcttccccccaaaacccaaggacaccctcatgatctcccggacccctgaggtcacatgcgtggtggtggacgtgagccacgaagaccctgaggtcaagttcaactggtacgtggacggcgtggaggtgcataatgccaagacaaagccgcgggaggagcagtacaacagcacgtaccgtgtggtcagcgtcctcaccgtcctgcaccaggactggctgaatggcaaggagtacaagtgcaaggtctccaacaaagccctcccagcccccatcgagaaaaccatctccaaagccaaagggcagccccgagaaccacaggtgtacaccctgcccccatcccgggaggagatgaccaagaaccaggtcagcctgacctgcctggtcaaaggcttctatcccagcgacatcgccgtggagtgggagagcaatgggcagccggagaacaactacaagaccacgcctcccgtgctggactccgacggctccttcttcctctatagcaagctcaccgtggacaagagcaggtggcagcaggggaacgtcttctcatgctccgtgatgcatgaggctctgcacaaccactacacgcagaagagcctctccctgtctccgggtaaatga

SEQ ID NO: 214 - protein, 370 aa, Zika virus
METDTLLLWVLLLWVPGSTGDTRVSYSLCTAAFTFTKIPAETLHGTVTVEVQYAGTDGPCKVPAQMAVDMQTLTPVGRLITANPVITRSTENSKMMLELDPPFGDSYIVIGVGEKKITHHWHRSGSTIDYKDDDDKVDEPKSCDKTHTCPPCPAPELLGGPSVFLFPPKPKDTLMISRTPEVTCVVVDVSHEDPEVKFNWYVDGVEVHNAKTKPREEQYNSTYRVVSVLTVLHQDWLNGKEYKCKVSNKALPAPIEKTISKAKGQPREPQVYTLPPSREEMTKNQVSLTCLVKGFYPSDIAVEWESNGQPENNYKTTPPVLDSDGSFFLYSKLTVDKSRWQQGNVFSCSVMHEALHNHYTQKSLSLSPGK

SEQ ID NO: 215 - DNA, 1134 bp, Zika virus
atggagacagacacactcctgctatgggtactgctgctctgggttccaggttccactggtgacacgcgtcatcaccatcaccatcacgtgtcctactccctgtgcaccgccgccttcaccttcaccaagatccccgccgagaccctgcacggcaccgtgaccgtggaggtgcagtacgccggcaccgacggcccctgcaaggtgcccgcccagatggccgtggacatgcagaccctgacccccgtgggccgcctgatcaccgccaaccccgtgatcaccgactccaccgacaactccaagatgatgctggagctggacccccccttcggcgactcctacatcgtgatcggcgtgggcgagaagaagatcacccaccactggcaccgctccggctccaccatcgactacaaggacgacgacgacaaggtcgacgagcccagagggcccacaatcaagccctgtcctccatgcaaatgcccagcacctaacctcttgggtggaccatccgtcttcatcttccctccaaagatcaaggatgtactcatgatctccctgagccccatagtcacatgtgtggtggtggatgtgagcgaggatgacccagatgtccagatcagctggtttgtgaacaacgtggaagtacacacagctcagacacaaacccatagagaggattacaacagtactctccgggtggtcagtgccctccccatccagcaccaggactggatgagtggcaaggagttcaaatgcaaggtcaacaacaaagacctcccagcgcccatcgagagaaccatctcaaaacccaaagggtcagtaagagctccacaggtatatgtcttgcctccaccagaagaagagatgactaagaaacaggtcactctgacctgcatggtcacagacttcatgcctgaagacatttacgtggagtggaccaacaacgggaaaacagagctaaactacaagaacactgaaccagtcctggactctgatggttcttacttcatgtacagcaagctgagagtggaaaagaagaactgggtggaaagaaatagctactcctgttcagtggtccacgagggtctgcacaatcaccacacgactaagagcttctcccggactccgggtaaatag

SEQ ID NO: 216 - protein, 377 aa, Zika virus; identical to SEQ ID NO: 170

SEQ ID NO: 217 - DNA, 1134 bp, Zika virus
atggagacagacacactcctgctatgggtactgctgctctgggttccaggttccactggtgacacgcgtcatcaccatcaccatcacgtgtcctactccctgtgcaccgccgccttcaccttcaccaagatccccgccgagaccctgcacggcaccgtgaccgtggaggtgcagtacgccggcaccgacggcccctgcaaggtgcccgcccagatggccgtggacatgcagaccctgacccccgtgggccgcctgatcaccgccaaccccgtgatcaccgactccaccgagaactccaagatgatgctggagctggacccccccttcggcgactcctacatcgtgatcggcgtgggcgagaagaagatcacccaccactggcaccgctccggctccaccatcgactacaaggacgacgacgacaaggtcgacgagcccagagggcccacaatcaagccctgtcctccatgcaaatgcccagcacctaacctcttgggtggaccatccgtcttcatcttccctccaaagatcaaggatgtactcatgatctccctgagccccatagtcacatgtgtggtggtggatgtgagcgaggatgacccagatgtccagatcagctggtttgtgaacaacgtggaagtacacacagctcagacacaaacccatagagaggattacaacagtactctccgggtggtcagtgccctccccatccagcaccaggactggatgagtggcaaggagttcaaatgcaaggtcaacaacaaagacctcccagcgcccatcgagagaaccatctcaaaacccaaagggtcagtaagagctccacaggtatatgtcttgcctccaccagaagaagagatgactaagaaacaggtcactctgacctgcatggtcacagacttcatgcctgaagacatttacgtggagtggaccaacaacgggaaaacagagctaaactacaagaacactgaaccagtcctggactctgatggttcttacttcatgtacagcaagctgagagtggaaaagaagaactgggtggaaagaaatagctactcctgttcagtggtccacgagggtctgcacaatcaccacacgactaagagcttctcccggactccgggtaaatag

SEQ ID NO: 218 - protein, 377 aa, Zika virus
METDTLLLWVLLLWVPGSTGDTRHHHHHHVSYSLCTAAFTFTKIPAETLHGTVTVEVQYAGTDGPCKVPAQMAVDMQTLTPVGRLITANPVITDSTENSKMMLELDPPFGDSYIVIGVGEKKITHHWHRSGSTIDYKDDDDKVDEPRGPTIKPCPPCKCPAPNLLGGPSVFIFPPKIKDVLMISLSPIVTCVVVDVSEDDPDVQISWFVNNVEVHTAQTQTHREDYNSTLRVVSALPIQHQDWMSGKEFKCKVNNKDLPAPIERTISKPKGSVRAPQVYVLPPPEEEMTKKQVTLTCMVTDFMPEDIYVEWTNNGKTELNYKNTEPVLDSDGSYFMYSKLRVEKKNWVERNSYSCSVVHEGLHNHHTTKSFSRTPGK

SEQ ID NO: 219 - DNA, 1134 bp, Zika virus
atggagacagacacactcctgctatgggtactgctgctctgggttccaggttccactggtgacacgcgtcatcaccatcaccatcacgtgtcctactccctgtgcaccgccgccttcaccttcaccaagatccccgccgagaccctgcacggcaccgtgaccgtggaggtgcagtacgccggcaccgacggcccctgcaaggtgcccgcccagatggccgtggacatgcagaccctgacccccgtgggccgcctgatcaccgccaaccccgtgatcaccgagtccaccgagcagtccaagatgatgctggagctggacccccccttcggcgactcctacatcgtgatcggcgtgggcgagaagaagatcacccaccactggcaccgctccggctccaccatcgactacaaggacgacgacgacaaggtcgacgagcccagagggcccacaatcaagccctgtcctccatgcaaatgcccagcacctaacctcttgggtggaccatccgtcttcatcttccctccaaagatcaaggatgtactcatgatctccctgagccccatagtcacatgtgtggtggtggatgtgagcgaggatgacccagatgtccagatcagctggtttgtgaacaacgtggaagtacacacagctcagacacaaacccatagagaggattacaacagtactctccgggtggtcagtgccctccccatccagcaccaggactggatgagtggcaaggagttcaaatgcaaggtcaacaacaaagacctcccagcgcccatcgagagaaccatctcaaaacccaaagggtcagtaagagctccacaggtatatgtcttgcctccaccagaagaagagatgactaagaaacaggtcactctgacctgcatggtcacagacttcatgcctgaagacatttacgtggagtggaccaacaacgggaaaacagagctaaactacaagaacactgaaccagtcctggactctgatggttcttacttcatgtacagcaagctgagagtggaaaagaagaactgggtggaaagaaatagctactcctgttcagtggtccacgagggtctgcacaatcaccacacgactaagagcttctcccggactccgggtaaatag

SEQ ID NO: 220 - protein, 377 aa, Zika virus
METDTLLLWVLLLWVPGSTGDTRHHHHHHVSYSLCTAAFTFTKIPAETLHGTVTVEVQYAGTDGPCKVPAQMAVDMQTLTPVGRLITANPVITESTEQSKMMLELDPPFGDSYIVIGVGEKKITHHWHRSGSTIDYKDDDDKVDEPRGPTIKPCPPCKCPAPNLLGGPSVFIFPPKIKDVLMISLSPIVTCVVVDVSEDDPDVQISWFVNNVEVHTAQTQTHREDYNSTLRVVSALPIQHQDWMSGKEFKCKVNNKDLPAPIERTISKPKGSVRAPQVYVLPPPEEEMTKKQVTLTCMVTDFMPEDIYVEWTNNGKTELNYKNTEPVLDSDGSYFMYSKLRVEKKNWVERNSYSCSVVHEGLHNHHTTKSFSRTPGK

SEQ ID NO: 221 - DNA, 1134 bp, Zika virus
atggagacagacacactcctgctatgggtactgctgctctgggttccaggttccactggtgacacgcgtcatcaccatcaccatcacgtgtcctactccctgtgcaccgccgccttcaccttcaccaagatccccgccgagaccctgcacggcaccgtgaccgtggaggtgcagtacgccggcaccgacggcccctgcaaggtgcccgcccagatggccgtggacatgcagaccctgacccccgtgggccgcctgatcaccgccaaccccgtgatcaccgagacctccgagaactccaagatgatgctggagctggacccccccttcggcgactcctacatcgtgatcggcgtgggcgagaagaagatcacccaccactggcaccgctccggctccaccatcgactacaaggacgacgacgacaaggtcgacgagcccagagggcccacaatcaagccctgtcctccatgcaaatgcccagcacctaacctcttgggtggaccatccgtcttcatcttccctccaaagatcaaggatgtactcatgatctccctgagccccatagtcacatgtgtggtggtggatgtgagcgaggatgacccagatgtccagatcagctggtttgtgaacaacgtggaagtacacacagctcagacacaaacccatagagaggattacaacagtactctccgggtggtcagtgccctccccatccagcaccaggactggatgagtggcaaggagttcaaatgcaaggtcaacaacaaagacctcccagcgcccatcgagagaaccatctcaaaacccaaagggtcagtaagagctccacaggtatatgtcttgcctccaccagaagaagagatgactaagaaacaggtcactctgacctgcatggtcacagacttcatgcctgaagacatttacgtggagtggaccaacaacgggaaaacagagctaaactacaagaacactgaaccagtcctggactctgatggttcttacttcatgtacagcaagctgagagtggaaaagaagaactgggtggaaagaaatagctactcctgttcagtggtccacgagggtctgcacaatcaccacacgactaagagcttctcccggactccgggtaaatag

SEQ ID NO: 222 - protein, 377 aa, Zika virus
METDTLLLWVLLLWVPGSTGDTRHHHHHHVSYSLCTAAFTFTKIPAETLHGTVTVEVQYAGTDGPCKVPAQMAVDMQTLTPVGRLITANPVITETSENSKMMLELDPPFGDSYIVIGVGEKKITHHWHRSGSTIDYKDDDDKVDEPRGPTIKPCPPCKCPAPNLLGGPSVFIFPPKIKDVLMISLSPIVTCVVVDVSEDDPDVQISWFVNNVEVHTAQTQTHREDYNSTLRVVSALPIQHQDWMSGKEFKCKVNNKDLPAPIERTISKPKGSVRAPQVYVLPPPEEEMTKKQVTLTCMVTDFMPEDIYVEWTNNGKTELNYKNTEPVLDSDGSYFMYSKLRVEKKNWVERNSYSCSVVHEGLHNHHTTKSFSRTPGK

SEQ ID NO: 223 - DNA, 1134 bp, Zika virus
atggagacagacacactcctgctatgggtactgctgctctgggttccaggttccactggtgacacgcgtcatcaccatcaccatcacgtgtcctactccctgtgcaccgccgccttcaccttcaccaagatccccgccgagaccctgcacggcaccgtgaccgtggaggtgcagtacgccggcaccgacggcccctgcaaggtgcccgcccagatggccgtggacatgcagaccctgacccccgtgggccgcctgatcaccgccaaccccgtgatcaccgagacctccgagcagtccaagatgatgctggagctggacccccccttcggcgactcctacatcgtgatcggcgtgggcgagaagaagatcacccaccactggcaccgctccggctccaccatcgactacaaggacgacgacgacaaggtcgacgagcccagagggcccacaatcaagccctgtcctccatgcaaatgcccagcacctaacctcttgggtggaccatccgtcttcatcttccctccaaagatcaaggatgtactcatgatctccctgagccccatagtcacatgtgtggtggtggatgtgagcgaggatgacccagatgtccagatcagctggtttgtgaacaacgtggaagtacacacagctcagacacaaacccatagagaggattacaacagtactctccgggtggtcagtgccctccccatccagcaccaggactggatgagtggcaaggagttcaaatgcaaggtcaacaacaaagacctcccagcgcccatcgagagaaccatctcaaaacccaaagggtcagtaagagctccacaggtatatgtcttgcctccaccagaagaagagatgactaagaaacaggtcactctgacctgcatggtcacagacttcatgcctgaagacatttacgtggagtggaccaacaacgggaaaacagagctaaactacaagaacactgaaccagtcctggactctgatggttcttacttcatgtacagcaagctgagagtggaaaagaagaactgggtggaaagaaatagctactcctgttcagtggtccacgagggtctgcacaatcaccacacgactaagagcttctcccggactccgggtaaatag

SEQ ID NO: 224 - protein, 377 aa, Zika virus
METDTLLLWVLLLWVPGSTGDTRHHHHHHVSYSLCTAAFTFTKIPAETLHGTVTVEVQYAGTDGPCKVPAQMAVDMQTLTPVGRLITANPVITETSEQSKMMLELDPPFGDSYIVIGVGEKKITHHWHRSGSTIDYKDDDDKVDEPRGPTIKPCPPCKCPAPNLLGGPSVFIFPPKIKDVLMISLSPIVTCVVVDVSEDDPDVQISWFVNNVEVHTAQTQTHREDYNSTLRVVSALPIQHQDWMSGKEFKCKVNNKDLPAPIERTISKPKGSVRAPQVYVLPPPEEEMTKKQVTLTCMVTDFMPEDIYVEWTNNGKTELNYKNTEPVLDSDGSYFMYSKLRVEKKNWVERNSYSCSVVHEGLHNHHTTKSFSRTPGK

SEQ ID NO: 225 - DNA, 1134 bp, Zika virus
atggagacagacacactcctgctatgggtactgctgctctgggttccaggttccactggtgacacgcgtcatcaccatcaccatcacgtgtcctactccctgtgcaccgccgccttcaccttcaccaagatccccgccgagaccctgcacggcaccgtgaccgtggaggtgcagtacgccggcaccgacggcccctgcaaggtgcccgcccagatggccgtggacatgcagaccctgacccccgtgggccgcctgatcaccgccaaccccgtgatcaccaagtccaccgagaactccaagatgatgctggagctggacccccccttcggcgactcctacatcgtgatcggcgtgggcgagaagaagatcacccaccactggcaccgctccggctccaccatcgactacaaggacgacgacgacaaggtcgacgagcccagagggcccacaatcaagccctgtcctccatgcaaatgcccagcacctaacctcttgggtggaccatccgtcttcatcttccctccaaagatcaaggatgtactcatgatctccctgagccccatagtcacatgtgtggtggtggatgtgagcgaggatgacccagatgtccagatcagctggtttgtgaacaacgtggaagtacacacagctcagacacaaacccatagagaggattacaacagtactctccgggtggtcagtgccctccccatccagcaccaggactggatgagtggcaaggagttcaaatgcaaggtcaacaacaaagacctcccagcgcccatcgagagaaccatctcaaaacccaaagggtcagtaagagctccacaggtatatgtcttgcctccaccagaagaagagatgactaagaaacaggtcactctgacctgcatggtcacagacttcatgcctgaagacatttacgtggagtggaccaacaacgggaaaacagagctaaactacaagaacactgaaccagtcctggactctgatggttcttacttcatgtacagcaagctgagagtggaaaagaagaactgggtggaaagaaatagctactcctgttcagtggtccacgagggtctgcacaatcaccacacgactaagagcttctcccggactccgggtaaatag

SEQ ID NO: 226 - protein, 377 aa, Zika virus
METDTLLLWVLLLWVPGSTGDTRHHHHHHVSYSLCTAAFTFTKIPAETLHGTVTVEVQYAGTDGPCKVPAQMAVDMQTLTPVGRLITANPVITKSTENSKMMLELDPPFGDSYIVIGVGEKKITHHWHRSGSTIDYKDDDDKVDEPRGPTIKPCPPCKCPAPNLLGGPSVFIFPPKIKDVLMISLSPIVTCVVVDVSEDDPDVQISWFVNNVEVHTAQTQTHREDYNSTLRVVSALPIQHQDWMSGKEFKCKVNNKDLPAPIERTISKPKGSVRAPQVYVLPPPEEEMTKKQVTLTCMVTDFMPEDIYVEWTNNGKTELNYKNTEPVLDSDGSYFMYSKLRVEKKNWVERNSYSCSVVHEGLHNHHTTKSFSRTPGK

SEQ ID NO: 227 - DNA, 1134 bp, Zika virus
atggagacagacacactcctgctatgggtactgctgctctgggttccaggttccactggtgacacgcgtcatcaccatcaccatcacgtgtcctactccctgtgcaccgccgccttcaccttcaccaagatccccgccgagaccctgcacggcaccgtgaccgtggaggtgcagtacgccggcaccgacggcccctgcaaggtgcccgcccagatggccgtggacatgcagaccctgacccccgtgggccgcctgatcaccgccaaccccgtgatcaccaactccaccgaggagtccaagatgatgctggagctggacccccccttcggcgactcctacatcgtgatcggcgtgggcgagaagaagatcacccaccactggcaccgctccggctccaccatcgactacaaggacgacgacgacaaggtcgacgagcccagagggcccacaatcaagccctgtcctccatgcaaatgcccagcacctaacctcttgggtggaccatccgtcttcatcttccctccaaagatcaaggatgtactcatgatctccctgagccccatagtcacatgtgtggtggtggatgtgagcgaggatgacccagatgtccagatcagctggtttgtgaacaacgtggaagtacacacagctcagacacaaacccatagagaggattacaacagtactctccgggtggtcagtgccctccccatccagcaccaggactggatgagtggcaaggagttcaaatgcaaggtcaacaacaaagacctcccagcgcccatcgagagaaccatctcaaaacccaaagggtcagtaagagctccacaggtatatgtcttgcctccaccagaagaagagatgactaagaaacaggtcactctgacctgcatggtcacagacttcatgcctgaagacatttacgtggagtggaccaacaacgggaaaacagagctaaactacaagaacactgaaccagtcctggactctgatggttcttacttcatgtacagcaagctgagagtggaaaagaagaactgggtggaaagaaatagctactcctgttcagtggtccacgagggtctgcacaatcaccacacgactaagagcttctcccggactccgggtaaatag

SEQ ID NO: 228 - protein, 377 aa, Zika virus
METDTLLLWVLLLWVPGSTGDTRHHHHHHVSYSLCTAAFTFTKIPAETLHGTVTVEVQYAGTDGPCKVPAQMAVDMQTLTPVGRLITANPVITNSTEESKMMLELDPPFGDSYIVIGVGEKKITHHWHRSGSTIDYKDDDDKVDEPRGPTIKPCPPCKCPAPNLLGGPSVFIFPPKIKDVLMISLSPIVTCVVVDVSEDDPDVQISWFVNNVEVHTAQTQTHREDYNSTLRVVSALPIQHQDWMSGKEFKCKVNNKDLPAPIERTISKPKGSVRAPQVYVLPPPEEEMTKKQVTLTCMVTDFMPEDIYVEWTNNGKTELNYKNTEPVLDSDGSYFMYSKLRVEKKNWVERNSYSCSVVHEGLHNHHTTKSFSRTPGK

SEQ ID NO: 229 - DNA, 1134 bp, Zika virus
atggagacagacacactcctgctatgggtactgctgctctgggttccaggttccactggtgacacgcgtcatcaccatcaccatcacgtgtcctactccctgtgcaccgccgccttcaccttcaccaagatccccgccgagaccctgcacggcaccgtgaccgtggaggtgcagtacgccggcaccgacggcccctgcaaggtgcccgcccagatggccgtggacatgcagaccctgacccccgtgggccgcctgatcaccgccaaccccgtgatcacccgctccaccgagaactccaagatgatgctggagctggacccccccttcggcgactcctacatcgtgatcggcgtgggcgagaagaagatcacccaccactggcaccgctccggctccaccatcgactacaaggacgacgacgacaaggtcgacgagcccagagggcccacaatcaagccctgtcctccatgcaaatgcccagcacctaacctcttgggtggaccatccgtcttcatcttccctccaaagatcaaggatgtactcatgatctccctgagccccatagtcacatgtgtggtggtggatgtgagcgaggatgacccagatgtccagatcagctggtttgtgaacaacgtggaagtacacacagctcagacacaaacccatagagaggattacaacagtactctccgggtggtcagtgccctccccatccagcaccaggactggatgagtggcaaggagttcaaatgcaaggtcaacaacaaagacctcccagcgcccatcgagagaaccatctcaaaacccaaagggtcagtaagagctccacaggtatatgtcttgcctccaccagaagaagagatgactaagaaacaggtcactctgacctgcatggtcacagacttcatgcctgaagacatttacgtggagtggaccaacaacgggaaaacagagctaaactacaagaacactgaaccagtcctggactctgatggttcttacttcatgtacagcaagctgagagtggaaaagaagaactgggtggaaagaaatagctactcctgttcagtggtccacgagggtctgcacaatcaccacacgactaagagcttctcccggactccgggtaaatag

SEQ ID NO: 230 - protein, 377 aa, Zika virus
METDTLLLWVLLLWVPGSTGDTRHHHHHHVSYSLCTAAFTFTKIPAETLHGTVTVEVQYAGTDGPCKVPAQMAVDMQTLTPVGRLITANPVITRSTENSKMMLELDPPFGDSYIVIGVGEKKITHHWHRSGSTIDYKDDDDKVDEPRGPTIKPCPPCKCPAPNLLGGPSVFIFPPKIKDVLMISLSPIVTCVVVDVSEDDPDVQISWFVNNVEVHTAQTQTHREDYNSTLRVVSALPIQHQDWMSGKEFKCKVNNKDLPAPIERTISKPKGSVRAPQVYVLPPPEEEMTKKQVTLTCMVTDFMPEDIYVEWTNNGKTELNYKNTEPVLDSDGSYFMYSKLRVEKKNWVERNSYSCSVVHEGLHNHHTTKSFSRTPGK

SEQ ID NO: 231 - DNA, 324 bp, Zika virus
atgctgggcaacaagcgcctgggcctgtccggcctgaccctggccctgtccctgctggtgtgcctgggcgccctggccgaggcccatcaccatcaccatcactacccctccaagcccgacaacccccccgacgccgagggcgccgaggacatggcccgctactactccgccctgcgccactacatcaacctgatcacccgccagcgctacggcaagcgctcctcccccgagaccctgatctccgacctgctgatgcgcggctccaccggctactccaccgcccccgtgccccgcacccgcctggaggaccccgccatgtggtag

SEQ ID NO: 232 - protein, 107 aa, Zika virus
MLGNKRLGLSGLTLALSLLVCLGALAEAHHHHHHYPSKPDNPPDAEGAEDMARYYSALRHYINLITRQRYGKRSSPETLISDLLMRGSTGYSTAPVPRTRLEDPAMW

SEQ ID NO: 233 - DNA, 324 bp, Zika virus
atgctgggcaacaagcgcctgggcctgtccggcctgaccctggccctgtccctgctggtgtgcctgggcgccctggccgaggcccatcaccatcaccatcactacccctccaagcccgacaacccccccgacgccgagggcgccgaggacatggcccgctactactccgccctgcgccactacatcaacctgatcacccgccagcgctacggcaagcgctcctcccccgagaccctgatctccgacctgctgatgcgcgtgatgaagcaggacggccacgtgatggtgccccgcacccgcctggaggaccccgccatgtggtag

SEQ ID NO: 234 - protein, 107 aa, Zika virus
MLGNKRLGLSGLTLALSLLVCLGALAEAHHHHHHYPSKPDNPPDAEGAEDMARYYSALRHYINLITRQRYGKRSSPETLISDLLMRVMKQDGHVMVPRTRLEDPAMW

SEQ ID NO: 235 - DNA, 810 bp, Homo sapiens
atggagacagacacactcctgctatgggtactgctgctctgggttccaggttccactggtgacacgcgtcatcaccatcaccatcacgtgggcatcaccatgccccgcaccaagccctccgcccccgccggcgccctgaagacccccggcaccggcaagaccgacgacgccaaggtgtccgagaagggccgcctgtcccccaaggcctcccaggtgaagcgctccccctccgacgccggccgctcctccggcgacgagtccaagaagcccctgccctcctcctcccgcacccccaccgccaacgccaactccttcggcttcaagaagcagtccggctccgccgccggcctggccatgatcaccgcctccggcgtgaccgtgacctcccgctccgccaccctgggcaagatccccaagtcctccgccctggtgtcccgctccgccggccgcaagtcctccatggacggcgcccagaaccaggacgacggctacctggccctgtcctcccgcaccaacctgcagtaccgctccctgccccgcccctccaagtccaactcccgcaacggcgccggcaaccgctcctccacctcctccatcgactccaacatctcctccaagtccgccggcctgcccgtgcccaagctgcgcgagccctccaagaccgccctgggctcctccctgcccggcctggtgaaccagaccgacaaggagaagggcatctcctccgacaacgagtccgtggcctcctgcaactccgtgaaggtgaaccccgccgcccagcccgtgtcctcccccgcccagacctcctag

SEQ ID NO: 236 - protein, 269 aa, Homo sapiens
METDTLLLWVLLLWVPGSTGDTRHHHHHHVGITMPRTKPSAPAGALKTPGTGKTDDAKVSEKGRLSPKASQVKRSPSDAGRSSGDESKKPLPSSSRTPTANANSFGFKKQSGSAAGLAMITASGVTVTSRSATLGKIPKSSALVSRSAGRKSSMDGAQNQDDGYLALSSRTNLQYRSLPRPSKSNSRNGAGNRSSTSSIDSNISSKSAGLPVPKLREPSKTALGSSLPGLVNQTDKEKGISSDNESVASCNSVKVNPAAQPVSSPAQTS

SEQ ID NO: 237 - DNA, 810 bp, Homo sapiens
atggagacagacacactcctgctatgggtactgctgctctgggttccaggttccactggtgacacgcgtcatcaccatcaccatcacgtgggcatcaccatgccccgcaccaagccctccgcccccgccggcgccctgaagacccccggcaccggcaagaccgacgacgccaaggtgtccgagctgcgcaagggctcccccaaggcctcccaggtgaagcgctccccctccgacgccggccgctcctccggcgacgagtccaagaagcccctgccctcctcctcccgcacccccaccgccaacgccaactccttcggcttcaagaagcagtccggctccgccgccggcctggccatgatcaccgcctccggcgtgaccgtgacctcccgctccgccaccctgggcaagatccccaagtcctccgccctggtgtcccgctccgccggccgcaagtcctccatggacggcgcccagaaccaggacgacggctacctggccctgtcctcccgcaccaacctgcagtaccgctccctgccccgcccctccaagtccaactcccgcaacggcgccggcaaccgctcctccacctcctccatcgactccaacatctcctccaagtccgccggcctgcccgtgcccaagctgcgcgagccctccaagaccgccctgggctcctccctgcccggcctggtgaaccagaccgacaaggagaagggcatctcctccgacaacgagtccgtggcctcctgcaactccgtgaaggtgaaccccgccgcccagcccgtgtcctcccccgcccagacctcctag

SEQ ID NO: 238 - protein, 269 aa, Homo sapiens
METDTLLLWVLLLWVPGSTGDTRHHHHHHVGITMPRTKPSAPAGALKTPGTGKTDDAKVSELRKGSPKASQVKRSPSDAGRSSGDESKKPLPSSSRTPTANANSFGFKKQSGSAAGLAMITASGVTVTSRSATLGKIPKSSALVSRSAGRKSSMDGAQNQDDGYLALSSRTNLQYRSLPRPSKSNSRNGAGNRSSTSSIDSNISSKSAGLPVPKLREPSKTALGSSLPGLVNQTDKEKGISSDNESVASCNSVKVNPAAQPVSSPAQTS

SEQ ID NO: 239 - DNA, 810 bp, Homo sapiens
atggagacagacacactcctgctatgggtactgctgctctgggttccaggttccactggtgacacgcgtcatcaccatcaccatcacgtgggcatcaccatgccccgcaccaagccctccgcccccgccggcgccctgaagacccccggcaccggcaagaccgacgacgccaaggtgtccgagaagggccgcctgtcccccaaggcctcccaggtgaagcgctccccctccgacgccggccgctcctccggcgacgagtccaagaagcccctgccctcctcctcccgcacccccaccgccaacgccaactccttcggcttcaagaagcagtccggctccgccgccggcctggccatgatcaccgcctccggcgtgaccgtgacctcccgctccgccaccctgggcaagatccccaagtcctccgccctggtgtcccgctccgccggccgcaagtcctccatggacggcgcccagaaccaggacgacggctacctggccctgtcctcccgcaccaacctgcagtaccgctccctgccccgcccctccaagtccaactcccgcaacggcgccggcaaccgctcctccacctcctccatcgactccaacatctcctccaagtccgccggcctgcccgtgcccaagctgcgcgagccctccaagaccgccctgggctcctccctgcccggcctggtgaaccaggacacccgcgagaagggcatctcctccgacaacgagtccgtggcctcctgcaactccgtgaaggtgaaccccgccgcccagcccgtgtcctcccccgcccagacctcctag

SEQ ID NO: 240 - protein, 269 aa, Homo sapiens
METDTLLLWVLLLWVPGSTGDTRHHHHHHVGITMPRTKPSAPAGALKTPGTGKTDDAKVSEKGRLSPKASQVKRSPSDAGRSSGDESKKPLPSSSRTPTANANSFGFKKQSGSAAGLAMITASGVTVTSRSATLGKIPKSSALVSRSAGRKSSMDGAQNQDDGYLALSSRTNLQYRSLPRPSKSNSRNGAGNRSSTSSIDSNISSKSAGLPVPKLREPSKTALGSSLPGLVNQDTREKGISSDNESVASCNSVKVNPAAQPVSSPAQTS

SEQ ID NO: 241 - DNA, 810 bp, Homo sapiens
atggagacagacacactcctgctatgggtactgctgctctgggttccaggttccactggtgacacgcgtcatcaccatcaccatcacgtgggcatcaccatgccccgcaccaagccctccgcccccgccggcgccctgaagacccccggcaccggcaagaccgacgacgccaaggtgtccgagtccaccaacgacgaccccaaggcctcccaggtgaagcgctccccctccgacgccggccgctcctccggcgacgagtccaagaagcccctgccctcctcctcccgcacccccaccgccaacgccaactccttcggcttcaagaagcagtccggctccgccgccggcctggccatgatcaccgcctccggcgtgaccgtgacctcccgctccgccaccctgggcaagatccccaagtcctccgccctggtgtcccgctccgccggccgcaagtcctccatggacggcgcccagaaccaggacgacggctacctggccctgtcctcccgcaccaacctgcagtaccgctccctgccccgcccctccaagtccaactcccgcaacggcgccggcaaccgctcctccacctcctccatcgactccaacatctcctccaagtccgccggcctgcccgtgcccaagctgcgcgagccctccaagaccgccctgggctcctccctgcccggcctggtgaaccaggacacccgcgagaagggcatctcctccgacaacgagtccgtggcctcctgcaactccgtgaaggtgaaccccgccgcccagcccgtgtcctcccccgcccagacctcctag

SEQ ID NO: 242 - protein, 269 aa, Homo sapiens
METDTLLLWVLLLWVPGSTGDTRHHHHHHVGITMPRTKPSAPAGALKTPGTGKTDDAKVSESTNDDPKASQVKRSPSDAGRSSGDESKKPLPSSSRTPTANANSFGFKKQSGSAAGLAMITASGVTVTSRSATLGKIPKSSALVSRSAGRKSSMDGAQNQDDGYLALSSRTNLQYRSLPRPSKSNSRNGAGNRSSTSSIDSNISSKSAGLPVPKLREPSKTALGSSLPGLVNQDTREKGISSDNESVASCNSVKVNPAAQPVSSPAQTS

SEQ ID NO: 243 - DNA, 840 bp, Homo sapiens
atggagacagacacactcctgctatgggtactgctgctctgggttccaggttccactggtgacacgcgtcatcaccatcaccatcacgtgggcatcaccatgccccgcaccaagccctccgcccccgccggcgccctgaagacccccggcaccggcaagaccgacgacgccaaggtgtccgagtccaaggacgtgcagctgaagaacatcaccgactacatgtacctgcccaaggcctcccaggtgaagcgctccccctccgacgccggccgctcctccggcgacgagtccaagaagcccctgccctcctcctcccgcacccccaccgccaacgccaactccttcggcttcaagaagcagtccggctccgccgccggcctggccatgatcaccgcctccggcgtgaccgtgacctcccgctccgccaccctgggcaagatccccaagtcctccgccctggtgtcccgctccgccggccgcaagtcctccatggacggcgcccagaaccaggacgacggctacctggccctgtcctcccgcaccaacctgcagtaccgctccctgccccgcccctccaagtccaactcccgcaacggcgccggcaaccgctcctccacctcctccatcgactccaacatctcctccaagtccgccggcctgcccgtgcccaagctgcgcgagccctccaagaccgccctgggctcctccctgcccggcctggtgaaccaggacacccgcgagaagggcatctcctccgacaacgagtccgtggcctcctgcaactccgtgaaggtgaaccccgccgcccagcccgtgtcctcccccgcccagacctcctag

SEQ ID NO: 244 - protein, 279 aa, Homo sapiens
METDTLLLWVLLLWVPGSTGDTRHHHHHHVGITMPRTKPSAPAGALKTPGTGKTDDAKVSESKDVQLKNITDYMYLPKASQVKRSPSDAGRSSGDESKKPLPSSSRTPTANANSFGFKKQSGSAAGLAMITASGVTVTSRSATLGKIPKSSALVSRSAGRKSSMDGAQNQDDGYLALSSRTNLQYRSLPRPSKSNSRNGAGNRSSTSSIDSNISSKSAGLPVPKLREPSKTALGSSLPGLVNQDTREKGISSDNESVASCNSVKVNPAAQPVSSPAQTS

SEQ ID NO: 245 - DNA, 567 bp, Zika virus
atggagacagacacactcctgctatgggtactgctgctctgggttccaggttccactggtgacacgcgtcatcaccatcaccatcacgactacaaggacgacgacgacaagatcgtgaatgacaccgggcatgagaccgacgaaaacagggccaaagtcgagattacccccaattctccccgcgcagaggcaaccctcggaggatttggaagcctgggactggactgtgaaccaaggactggactcgacttcagcgacctctattatctcacaatgaataataagcactggcttgtacataaagaatggtttcacgacattcctcttccctggcacgccggggccgacacaggaacaccacactggaataacaaagaagctcttgtggagttcaaagacgctcacgcaaagcgccaaaccgtagtggtgctgggcagccaagaaggagccgttcacacagccttggctggggcattggaggctgaaatggacggagccctgcgcaagggctccagtggacaccttaagtgccgcctgaaaatggataagctgagattgaagggctag

SEQ ID NO: 246 - protein, 188 aa, Zika virus
METDTLLLWVLLLWVPGSTGDTRHHHHHHDYKDDDDKIVNDTGHETDENRAKVEITPNSPRAEATLGGFGSLGLDCEPRTGLDFSDLYYLTMNNKHWLVHKEWFHDIPLPWHAGADTGTPHWNNKEALVEFKDAHAKRQTVVVLGSQEGAVHTALAGALEAEMDGALRKGSSGHLKCRLKMDKLRLKG

SEQ ID NO: 247 - DNA, 567 bp, Zika virus
atggagacagacacactcctgctatgggtactgctgctctgggttccaggttccactggtgacacgcgtcatcaccatcaccatcacgactacaaggacgacgacgacaagatcgtgaatgacaccgggcatgagaccgacgaaaacagggccaaagtcgagattacccccaattctccccgcgcagaggcaaccctcggaggatttggaagcctgggactggactgtgaaccaaggactggactcgacttcagcgacctctattatctcacaatgaataataagcactggcttgtacataaagaatggtttcacgacattcctcttccctggcacgccggggccgacacaggaacaccacactggaataacaaagaagctcttgtggagttcaaagacgctcacgcaaagcgccaaaccgtagtggtgctgggcagccaagaaggagccgttcacacagccttggctggggcattggaggctgaaatggacggagcccgcaagggcctgtccagtggacaccttaagtgccgcctgaaaatggataagctgagattgaagggctag

SEQ ID NO: 248 - protein, 188 aa, Zika virus
METDTLLLWVLLLWVPGSTGDTRHHHHHHDYKDDDDKIVNDTGHETDENRAKVEITPNSPRAEATLGGFGSLGLDCEPRTGLDFSDLYYLTMNNKHWLVHKEWFHDIPLPWHAGADTGTPHWNNKEALVEFKDAHAKRQTVVVLGSQEGAVHTALAGALEAEMDGARKGLSSGHLKCRLKMDKLRLKG

SEQ ID NO: 249 - DNA, 567 bp, Zika virus
atggagacagacacactcctgctatgggtactgctgctctgggttccaggttccactggtgacacgcgtcatcaccatcaccatcacgactacaaggacgacgacgacaagatcgtgaatgacaccgggcatgagaccgacgaaaacagggccaaagtcgagattacccccaattctccccgcgcagaggcaaccctcggaggatttggaagcctgggactggactgtgaaccaaggactggactcgacttcagcgacctctattatctcacaatgaataataagcactggcttgtacataaagaatggtttcacgacattcctcttccctggcacgccggggccgacacaggaacaccacactggaataacaaagaagctcttgtggagttcaaagacgctcacgcaaagcgccaaaccgtagtggtgctgggcagccaagaaggagccgttcacacagccttggctggggcattggaggctgaaatggacggagccaagggccgcatcaccagtggacaccttaagtgccgcctgaaaatggataagctgagattgaagggctag

SEQ ID NO: 250 - protein, 188 aa, Zika virus
METDTLLLWVLLLWVPGSTGDTRHHHHHHDYKDDDDKIVNDTGHETDENRAKVEITPNSPRAEATLGGFGSLGLDCEPRTGLDFSDLYYLTMNNKHWLVHKEWFHDIPLPWHAGADTGTPHWNNKEALVEFKDAHAKRQTVVVLGSQEGAVHTALAGALEAEMDGAKGRITSGHLKCRLKMDKLRLKG

SEQ ID NO: 251 - DNA, 567 bp, Zika virus
atggagacagacacactcctgctatgggtactgctgctctgggttccaggttccactggtgacacgcgtcatcaccatcaccatcacgactacaaggacgacgacgacaagatcgtgaatgacaccgggcatgagaccgacgaaaacagggccaaagtcgagattacccccaattctccccgcgcagaggcaaccctcggaggatttggaagcctgggactggactgtgaaccaaggactggactcgacttcagcgacctctattatctcacaatgaataataagcactggcttgtacataaagaatggtttcacgacattcctcttccctggcacgccggggccgacacaggaacaccacactggaataacaaagaagctcttgtggagttcaaagacgctcacgcaaagcgccaaaccgtagtggtgctgggcagccaagaaggagccgttcacacagccttggctggggcattggaggctgaaatggacggagccggcctgtccaagcgcagtggacaccttaagtgccgcctgaaaatggataagctgagattgaagggctag

SEQ ID NO: 252 - protein, 188 aa, Zika virus
METDTLLLWVLLLWVPGSTGDTRHHHHHHDYKDDDDKIVNDTGHETDENRAKVEITPNSPRAEATLGGFGSLGLDCEPRTGLDFSDLYYLTMNNKHWLVHKEWFHDIPLPWHAGADTGTPHWNNKEALVEFKDAHAKRQTVVVLGSQEGAVHTALAGALEAEMDGAGLSKRSGHLKCRLKMDKLRLKG

SEQ ID NO: 253 - DNA, 1332 bp, Zika virus
atggagacagacacactcctgctatgggtactgctgctctgggttccaggttccactggtgacacgcgtcatcaccatcaccatcacgactacaaggacgacgacgacaagcgctgtataggggtcagcaatagggatttcgttgagggcatgtccggtggaacatgggtggatatagtcctggaacatggagggtgcgttacagttatggctcaagataaacccaccgtagatattgaattggtgacaaccacagtgtctaacatggccgaagttcggagctattgttatgaagccagtatcagcgacatggcttccgattcacgctgcccaacccagggtgaagcctacttggataagcaaagcgatacacaatatgtctgcaagcgaaccctggtaaacggctggggccgcgacggctgcgggttgttcggcaagggatctctcgtcacatgcgccaaatttgcatgcagtaagaaaatgaccggaaaatccatacagcccgagaacctggaatatcggatcatgctctctgtccacggaagtcagcattccggtatgatcgtgaatgacaccgggcatgagaccgacgaaaacagggccaaagtcgagattacccccaattctccccgcgcagaggcaaccctcggaggatttggaagcctgggactggactgtgaaccaaggactggactcgacttcagcgacctctattatctcacaatgaataataagcactggcttgtacataaagaatggtttcacgacattcctcttccctggcacgccggggccgacacaggaacaccacactggaataacaaagaagctcttgtggagttcaaagacgctcacgcaaagcgccaaaccgtagtggtgctgggcagccaagaaggagccgttcacacagccttggctggggcattggaggctgaaatggacggagccctgcgcaagggctccagtggacaccttaagtgccgcctgaaaatggataagctgagattgaagggcgtatcttattccctgtgtacagccgcatttacttttactaagattcctgccgaaacccttcacgggacagtaactgtagaggtacagtacgcagggactgacggtccttgcaaagtacccgcacaaatggccgtagacatgcaaaccctcactcctgttgggcgactgatcaccgctaacccagttataactaacacctccgaggagtccaaaatgatgcttgagttggaccctcctttcggtgacagttatatcgttataggcgtgggggaaaagaagattactcaccattggcaccgcagcggtagtactatctag

SEQ ID NO: 254 - protein, 443 aa, Zika virus
METDTLLLWVLLLWVPGSTGDTRHHHHHHDYKDDDDKRCIGVSNRDFVEGMSGGTWVDIVLEHGGCVTVMAQDKPTVDIELVTTTVSNMAEVRSYCYEASISDMASDSRCPTQGEAYLDKQSDTQYVCKRTLVNGWGRDGCGLFGKGSLVTCAKFACSKKMTGKSIQPENLEYRIMLSVHGSQHSGMIVNDTGHETDENRAKVEITPNSPRAEATLGGFGSLGLDCEPRTGLDFSDLYYLTMNNKHWLVHKEWFHDIPLPWHAGADTGTPHWNNKEALVEFKDAHAKRQTVVVLGSQEGAVHTALAGALEAEMDGALRKGSSGHLKCRLKMDKLRLKGVSYSLCTAAFTFTKIPAETLHGTVTVEVQYAGTDGPCKVPAQMAVDMQTLTPVGRLITANPVITNTSEESKMMLELDPPFGDSYIVIGVGEKKITHHWHRSGSTI

SEQ ID NO: 255 - protein, 5 aa, Zika virus
PRAEA

SEQ ID NO: 256 - protein, 5 aa, Zika virus
MSGGT

SEQ ID NO: 257 - DNA, 1812 bp, Zika virus
atgggcaagcgctccgccggctccatcatgtggctggcctccctggccgtggtgatcgcctgcgccggcgccgccgtgaccctgccctcccactccacccgcaagctgcagacccgctcccagacctggctggagtcccgcgagtacaccaagcacctgatccgcgtggagaactggatcttccgcaaccccggcttcgccctggccgccgccgccatcgcctggctgctgggctcctccacctcccagaaggtgatctacctggtgatgatcctgctgatcgcccccgcctactccatccgctgcatcggcgtgtccaaccgcgacttcgtggagggcatgtccggcggcacctgggtggacgtggtgctggagcacggcggctgcgtgaccgtgatggcccaggacaagcccaccgtggacatcgagctggtgaccaccaccgtgtccaacatggccgaggtgcgctcctactgctacgaggcctccatctccgacatggcctccgactcccgctgccccacccagggcgaggcctacctggacaagcagtccgacacccagtacgtgtgcaagcgcaccctggtgaatggctggggccgcgacggctgcggcctgttcggcaagggctccctggtgacctgcgccaagttcgcctgctccaagaagatgaccggcaagtccatccagcccgagaacctggagtaccgcatcatgctgtccgtgcacggctcccagcactccggcatgatcgtgaacgacaccggccacgagaccgacgagaaccgcgccaaggtggagatcacccccaactccccccgcgccgaggccaccctgggcggcttcggctccctgggcctggactgcgagccccgcaccggcctggacttctccgacctgtactacctgaccatgaacaacaagcactggctggtgcacaaggagtggttccacgacatccccctgccctggcacgccggcgccgacaccggcaccccccactggaacaacaaggaggccctggtggagttcaaggacgcccacgccaagcgccagaccgtggtggtgctgggctcccaggagggcgccgtgcacaccgccctggccggcgccctggaggccgagatggacggcgccaagggccgcctgtcctccggccacctgaagtgccgcctgaagatggacaagctgcgcctgaagggcgtgtcctactccctgtgcaccgccgccttcaccttcaccaagatccccgccgagaccctgcacggcaccgtgaccgtggaggtgcagtacgccggcaccgacggcccctgcaaggtgcccgcccagatggccgtggacatgcagaccctgacccccgtgggccgcctgatcaccgccaaccccgtgatcaccgagtccaccgagaactccaagatgatgctggagctggacccccccttcggcgactcctacatcgtgatcggcgtgggcgagaagaagatcacccaccactggcaccgctccggctccaccatcggcaaggccttcgaggccaccgtgcgcggcgccaagcgcatggccgtgctgggcgacaccgcctgggacttcggctccgtgggcggcgccctgaactccctgggcaagggcatccaccagatcttcggcgccgccttcaagtccctgttcggcggcatgtcctggttctcccagatcctgatcggcaccctgctgatgtggctgggcctgaacaccaagaacggctccatctccctgatgtgcctggccctgggcggcgtgctgatcttcctgtccaccgccgtgtccgcctag

SEQ ID NO: 258 - protein, 603 aa, Zika virus
MGKRSAGSIMWLASLAVVIACAGAAVTLPSHSTRKLQTRSQTWLESREYTKHLIRVENWIFRNPGFALAAAAIAWLLGSSTSQKVIYLVMILLIAPAYSIRCIGVSNRDFVEGMSGGTWVDVVLEHGGCVTVMAQDKPTVDIELVTTTVSNMAEVRSYCYEASISDMASDSRCPTQGEAYLDKQSDTQYVCKRTLVNGWGRDGCGLFGKGSLVTCAKFACSKKMTGKSIQPENLEYRIMLSVHGSQHSGMIVNDTGHETDENRAKVEITPNSPRAEATLGGFGSLGLDCEPRTGLDFSDLYYLTMNNKHWLVHKEWFHDIPLPWHAGADTGTPHWNNKEALVEFKDAHAKRQTVVVLGSQEGAVHTALAGALEAEMDGAKGRLSSGHLKCRLKMDKLRLKGVSYSLCTAAFTFTKIPAETLHGTVTVEVQYAGTDGPCKVPAQMAVDMQTLTPVGRLITANPVITESTENSKMMLELDPPFGDSYIVIGVGEKKITHHWHRSGSTIGKAFEATVRGAKRMAVLGDTAWDFGSVGGALNSLGKGIHQIFGAAFKSLFGGMSWFSQILIGTLLMWLGLNTKNGSISLMCLALGGVLIFLSTAVSA

SEQ ID NO: 259 - DNA, 1812 bp, Zika virus
atgggaaaaaggagtgctggctcaattatgtggctcgccagtctcgccgtagtcatagcttgcgccggggccgccgtgaccctccccagtcattcaactcgcaaacttcaaacacgaagtcaaacatggcttgagtcaagagaatacacgaagcacctcatccgcgtggaaaactggatattccgcaatccgggattcgcgctcgccgcagccgctattgcgtggcttctcgggagttctaccagccagaaggtcatttacttggtaatgatattgctcatcgcacccgcatactctatccgatgtataggggttagtaatcgggactttgttgagggaatgtcaggcgggacatgggtagatgtggtcctcgaacatggcggatgcgtcaccgtcatggcacaagacaagcctactgttgatatagagctggtgactaccactgtctccaatatggcagaagtccgatcctattgttacgaagcctccatatcagacatggcgagcgacagtagatgtccaacccagggtgaggcctacttggataagcagagtgatactcaatacgtttgcaaacgcactctggttgacaggggatggggaaacggatgcggactctttggcaagggaagtctggtcacttgcgcgaagttcgcctgttcaaaaaagatgaccggcaaaagcattcagccagaaaatttggaatacagaataatgttgtccgttcacggctcacaacacagcggcatgattgtcaacgatacgggtcatgagacggacgaaaacagggccaaagtcgagataacgcccaatagcccagaggcaagggctacattgggagggttcggctctttgggactcgactgtgaaccaagaaccggattggatttcagcgacctgtactatctgacgatgaataataaacactggttggtccacaaagaatggttccatgacatccccctgccctggcatgcaggcgagaaagcgcccaccccccactggaacaacaaggaggccttggtcgagtttaaggacgcgcacgcgaagaggcagacggtggtggtcctcggctcccaagagggggccgtgcatacagctcttgcaggagccctcgaagccgagatggacggagcactccgaaaaggatcctctgggcaccttaagtgtcgcctgaaaatggataagctccgactcaaaggtgtaagttactccctgtgtacggcagccttcaccttcacgaaaatacccgcggaaacgctccacggaaccgttacggttgaagtccagtacgccggcacggatggtccgtgtaaagtcccggctcagatggctgttgatatgcaaacccttactcccgtcggacggctcataacggctaacccggttattacgaacacgtctgaggaaagcaagatgatgctggaactcgacccaccgttcggtgactcctacatagtgataggagtaggagagaagaaaatcacccatcattggcaccgcagcggatcaaccataggtaaagcttttgaggccaccgtacgaggagcaaagcgaatggccgtgctgggagacaccgcctgggactttggctctgtagggggcgctctcaattccttgggcaaggggatacatcagatattcggggcagcatttaaatctctgtttggtggtatgagttggttttcccagattttgattgggactttgctgatgtggctcggtcttaataccaaaaacggctcaattagtctcatgtgtctcgctttgggaggagtcctcatattcctttccacagccgtatccgcatga

SEQ ID NO: 260 - protein, 603 aa, Zika virus
MGKRSAGSIMWLASLAVVIACAGAAVTLPSHSTRKLQTRSQTWLESREYTKHLIRVENWIFRNPGFALAAAAIAWLLGSSTSQKVIYLVMILLIAPAYSIRCIGVSNRDFVEGMSGGTWVDVVLEHGGCVTVMAQDKPTVDIELVTTTVSNMAEVRSYCYEASISDMASDSRCPTQGEAYLDKQSDTQYVCKRTLVDRGWGNGCGLFGKGSLVTCAKFACSKKMTGKSIQPENLEYRIMLSVHGSQHSGMIVNDTGHETDENRAKVEITPNSPEARATLGGFGSLGLDCEPRTGLDFSDLYYLTMNNKHWLVHKEWFHDIPLPWHAGEKAPTPHWNNKEALVEFKDAHAKRQTVVVLGSQEGAVHTALAGALEAEMDGALRKGSSGHLKCRLKMDKLRLKGVSYSLCTAAFTFTKIPAETLHGTVTVEVQYAGTDGPCKVPAQMAVDMQTLTPVGRLITANPVITNTSEESKMMLELDPPFGDSYIVIGVGEKKITHHWHRSGSTIGKAFEATVRGAKRMAVLGDTAWDFGSVGGALNSLGKGIHQIFGAAFKSLFGGMSWFSQILIGTLLMWLGLNTKNGSISLMCLALGGVLIFLSTAVSA

SEQ ID NO: 261 - DNA, 1812 bp, Zika virus
atggggaagcggtccgcgggatcaataatgtggcttgccagtctcgcagtagtgatcgcctgcgccggtgcagcagtcacacttccttcacattcaacgagaaaactgcagactagatcacaaacctggcttgagtccagggaatacacgaagcacctcataagagtggaaaattggatattccgcaaccccggctttgcgcttgcggctgctgctatcgcatggctgctgggctcttccaccagtcaaaaagtgatttacctggtgatgatcctcttgattgccccggcatattcaattcggtgcattggtgtcagcaaccgagactttgtagaaggcatgtcagggggcacgtgggttgacgttgtacttgaacacggtgggtgcgtcacagtgatggcccaagataagccaaccgtggacattgaactggtgactacaacggtttcaaatatggccgaggtacgctcctattgttacgaggcatctatatccgatatggcgtcagattcccggtgtccgacacaaggcgaagcgtaccttgataaacaatctgatacccagtacgtgtgtaaacgcacgcttgttgaccgcggttggggaaacggctgtggactcttcggaaaaggctcattggttacttgcgctaaatttgcttgttcaaaaaaaatgacagggaaatcaatacaaccggagaatttggagtaccgcatcatgctgtctgtacatggatctcaacacagcgggatgatagtcaacgacactggacatgagactgatgaaaacagggcaaaggtcgaaataactcccaattcacctagggccgaagccacactgggaggatttggctctctggggctggattgcgaaccaaggacaggactcgacttcagtgacctctactacttgacaatgaacaataagcactggctggttcacaaggagtggttccatgatattccccttccgtggcatgctggagccgatacgggaaccccccattggaacaacaaagaagcgttggtggaattcaaagatgcgcacgcgaaacgacaaacagtcgtggtgctcgggagtcaggaaggggccgtgcacacggctttggccggcgcattggaggcggagatggacggagccaaaggaaggctctccagtgggcatttgaaatgtagattgaaaatggataaacttcggctgaaaggggtgagttatagtctctgtactgctgcgtttacgtttacaaagattcctgcggagacacttcatggtaccgtgaccgtagaagtacagtacgcgggcacagacggcccttgtaaggttcccgctcagatggcggtggatatgcagacattgacgcctgttggtagactcattactgcgaatccggtaattactgagtcaacagagaattccaaaatgatgctcgaactcgaccctccgttcggagactcttacattgttattggagtgggtgaaaagaagatcacccatcattggcataggtctggctctaccataggcaaagctttcgaggccacagttcgcggagctaagcgaatggcagtccttggtgatactgcatgggatttcggctcagtagggggggcactgaactccttgggaaaaggcatccatcaaattttcggggcagcattcaaatccctgttcgggggcatgtcttggtttagccaaatcttgatcggtacgctgctgatgtggctcgggcttaacactaagaacggctccattagtttgatgtgtcttgctttgggtggtgttcttatttttttgtccaccgccgtttctgcttag

SEQ ID NO: 262 - protein, 603 aa, Zika virus
MGKRSAGSIMWLASLAVVIACAGAAVTLPSHSTRKLQTRSQTWLESREYTKHLIRVENWIFRNPGFALAAAAIAWLLGSSTSQKVIYLVMILLIAPAYSIRCIGVSNRDFVEGMSGGTWVDVVLEHGGCVTVMAQDKPTVDIELVTTTVSNMAEVRSYCYEASISDMASDSRCPTQGEAYLDKQSDTQYVCKRTLVDRGWGNGCGLFGKGSLVTCAKFACSKKMTGKSIQPENLEYRIMLSVHGSQHSGMIVNDTGHETDENRAKVEITPNSPRAEATLGGFGSLGLDCEPRTGLDFSDLYYLTMNNKHWLVHKEWFHDIPLPWHAGADTGTPHWNNKEALVEFKDAHAKRQTVVVLGSQEGAVHTALAGALEAEMDGAKGRLSSGHLKCRLKMDKLRLKGVSYSLCTAAFTFTKIPAETLHGTVTVEVQYAGTDGPCKVPAQMAVDMQTLTPVGRLITANPVITESTENSKMMLELDPPFGDSYIVIGVGEKKITHHWHRSGSTIGKAFEATVRGAKRMAVLGDTAWDFGSVGGALNSLGKGIHQIFGAAFKSLFGGMSWFSQILIGTLLMWLGLNTKNGSISLMCLALGGVLIFLSTAVSA

SEQ ID NO: 263 - protein, 5 aa, Yellow fever virus
AEENE

SEQ ID NO: 264 - protein, 5 aa, Yellow fever virus
ASTND

SEQ ID NO: 265 - protein, 5 aa, Yellow fever virus
CPSTG

SEQ ID NO: 266 - protein, 5 aa, Yellow fever virus
DKCPS

SEQ ID NO: 267 - protein, 5 aa, Yellow fever virus
DTGHG

SEQ ID NO: 268 - protein, 5 aa, Yellow fever virus
DTNDN

SEQ ID NO: 269 - protein, 5 aa, Yellow fever virus
EENEG

SEQ ID NO: 270 - protein, 5 aa, Yellow fever virus
EGDNA

SEQ ID NO: 271 - protein, 5 aa, Yellow fever virus
ENEGD

SEQ ID NO: 272 - protein, 5 aa, Yellow fever virus
IASTN

SEQ ID NO: 273 - protein, 5 aa, Yellow fever virus
KCPST

SEQ ID NO: 274 - protein, 5 aa, Yellow fever virus
KDTND

SEQ ID NO: 275 - protein, 5 aa, Yellow fever virus
NEGDN

SEQ ID NO: 276 - protein, 5 aa, Yellow fever virus
NPTDT

SEQ ID NO: 277 - protein, 5 aa, Yellow fever virus
NQEGS

SEQ ID NO: 278 - protein, 5 aa, Yellow fever virus
PSTGE

SEQ ID NO: 279 - protein, 5 aa, Yellow fever virus
PTDTG

SEQ ID NO: 280 - protein, 5 aa, Yellow fever virus
QEGSL

SEQ ID NO: 281 - protein, 5 aa, Yellow fever virus
TDTGH

SEQ ID NO: 282 - protein, 5 aa, Yellow fever virus
TKDTN

SEQ ID NO: 283 - protein, 5 aa, Dengue virus
ASTSQ

SEQ ID NO: 284 - protein, 5 aa, Dengue virus
DEKGV

SEQ ID NO: 285 - protein, 5 aa, Dengue virus
EGTDA

SEQ ID NO: 286 - protein, 5 aa, Dengue virus
EIQTS

SEQ ID NO: 287 - protein, 5 aa, Dengue virus
EKGVT

SEQ ID NO: 288 - protein, 5 aa, Dengue virus
ETTEH

SEQ ID NO: 289 - protein, 5 aa, Dengue virus
GASTS

SEQ ID NO: 290 - protein, 5 aa, Dengue virus
GNETT

SEQ ID NO: 291 - protein, 5 aa, Dengue virus
GVTQN

SEQ ID NO: 292 - protein, 5 aa, Dengue virus
IQTSG

SEQ ID NO: 293 - protein, 5 aa, Dengue virus
ISNTT

SEQ ID NO: 294 - protein, 5 aa, Dengue virus
KGVTQ

SEQ ID NO: 295 - protein, 5 aa, Dengue virus
NETTE

SEQ ID NO: 296 - protein, 5 aa, Dengue virus
NTTTD

SEQ ID NO: 297 - protein, 5 aa, Dengue virus
QTSGT

SEQ ID NO: 298 - protein, 5 aa, Dengue virus
SGAST

SEQ ID NO: 299 - protein, 5 aa, Dengue virus
SNTTT

SEQ ID NO: 300 - protein, 5 aa, Dengue virus
SQETW

SEQ ID NO: 301 - protein, 5 aa, Dengue virus
STSQE

SEQ ID NO: 302 - protein, 5 aa, Dengue virus
TEPPF

SEQ ID NO: 303 - protein, 5 aa, Dengue virus
TPQAP

SEQ ID NO: 304 - protein, 5 aa, Dengue virus
TSQET

SEQ ID NO: 305 - protein, 5 aa, Dengue virus
TTTDS

SEQ ID NO: 306 - protein, 5 aa, Dengue virus
ADTQG

SEQ ID NO: 307 - protein, 5 aa, Dengue virus
DTGKH

SEQ ID NO: 308 - protein, 5 aa, Dengue virus
DTQGS

SEQ ID NO: 309 - protein, 5 aa, Dengue virus
EGDGS

SEQ ID NO: 310 - protein, 5 aa, Dengue virus
GADTQ

SEQ ID NO: 311 - protein, 5 aa, Dengue virus
GDGSP

SEQ ID NO: 312 - protein, 5 aa, Dengue virus
GKHGK

SEQ ID NO: 313 - protein, 5 aa, Dengue virus
GNDTG

SEQ ID NO: 314 - protein, 5 aa, Dengue virus
ITPQS

SEQ ID NO: 315 - protein, 5 aa, Dengue virus
NDTGK

SEQ ID NO: 316 - protein, 5 aa, Dengue virus
PHAKK

SEQ ID NO: 317 - protein, 5 aa, Dengue virus
PQSST

SEQ ID NO: 318 - protein, 5 aa, Dengue virus
QSSTT

SEQ ID NO: 319 - protein, 5 aa, Dengue virus
SSTTE

SEQ ID NO: 320 - protein, 5 aa, Dengue virus
TGKHG

SEQ ID NO: 321 - protein, 5 aa, Dengue virus
TPQSS

SEQ ID NO: 322 - protein, 5 aa, Dengue virus
TQGSN

SEQ ID NO: 323 - protein, 5 aa, Dengue virus
TTEAE

SEQ ID NO: 324 - protein, 5 aa, Dengue virus
ATTET

SEQ ID NO: 325 - protein, 5 aa, Dengue virus
DGQGK

SEQ ID NO: 326 - protein, 5 aa, Dengue virus
EDGQG

SEQ ID NO: 327 - protein, 5 aa, Dengue virus
EIQNS

SEQ ID NO: 328 - protein, 5 aa, Dengue virus
ETPTW

SEQ ID NO: 329 - protein, 5 aa, Dengue virus
EVSET

SEQ ID NO: 330 - protein, 5 aa, Dengue virus
GATTE

SEQ ID NO: 331 - protein, 5 aa, Dengue virus
GKAHN

SEQ ID NO: 332 - protein, 5 aa, Dengue virus
GNETQ

SEQ ID NO: 333 - protein, 5 aa, Dengue virus
GQGKA

SEQ ID NO: 334 - protein, 5 aa, Dengue virus
IQNSG

SEQ ID NO: 335 - protein, 5 aa, Dengue virus
KGEDA

SEQ ID NO: 336 - protein, 5 aa, Dengue virus
NETQG

SEQ ID NO: 337 - protein, 5 aa, Dengue virus
NSGGT

SEQ ID NO: 338 - protein, 5 aa, Dengue virus
PQAST

SEQ ID NO: 339 - protein, 5 aa, Dengue virus
QASTT

SEQ ID NO: 340 - protein, 5 aa, Dengue virus
QGKAH

SEQ ID NO: 341 - protein, 5 aa, Dengue virus
QNSGG

SEQ ID NO: 342 - protein, 5 aa, Dengue virus
SETQH

SEQ ID NO: 343 - protein, 5 aa, Dengue virus
SGATT

SEQ ID NO: 344 - protein, 5 aa, Dengue virus
STEDG

SEQ ID NO: 345 - protein, 5 aa, Dengue virus
TEDGQ

SEQ ID NO: 346 - protein, 5 aa, Dengue virus
TETPT

SEQ ID NO: 347 - protein, 5 aa, Dengue virus
TPQAS

SEQ ID NO: 348 - protein, 5 aa, Dengue virus
YKGED

SEQ ID NO: 349 - protein, 5 aa, Dengue virus
ATEVD

SEQ ID NO: 350 - protein, 5 aa, Dengue virus
DSGDG

SEQ ID NO: 351 - protein, 5 aa, Dengue virus
DTSNH

SEQ ID NO: 352 - protein, 5 aa, Dengue virus
EGAGA

SEQ ID NO: 353 - protein, 5 aa, Dengue virus
EVDSG

SEQ ID NO: 354 - protein, 5 aa, Dengue virus
GNDTS

SEQ ID NO: 355 - protein, 5 aa, Dengue virus
ITPRS

SEQ ID NO: 356 - protein, 5 aa, Dengue virus
NDTSN

SEQ ID NO: 357 - protein, 5 aa, Dengue virus
NSRNT

SEQ ID NO: 358 - protein, 5 aa, Dengue virus
PRSPS

SEQ ID NO: 359 - protein, 5 aa, Dengue virus
SRNTS

SEQ ID NO: 360 - protein, 5 aa, Dengue virus
TEVDS

SEQ ID NO: 361 - protein, 5 aa, Dengue virus
TNSRN

SEQ ID NO: 362 - protein, 5 aa, Dengue virus
TPRSP

SEQ ID NO: 363 - protein, 5 aa, Dengue virus
TSNHG

SEQ ID NO: 364 - protein, 5 aa, Dengue virus
VDSGD

SEQ ID NO: 365 - protein, 5 aa, Zika virus
ADTGT

SEQ ID NO: 366 - protein, 5 aa, Zika virus
AGTDG

SEQ ID NO: 367 - protein, 5 aa, Zika virus
DTGHE

SEQ ID NO: 368 - protein, 5 aa, Zika virus
DTGTP

SEQ ID NO: 369 - protein, 5 aa, Zika virus
ESTEN

SEQ ID NO: 370 - protein, 5 aa, Zika virus
ETDEN

SEQ ID NO: 371 - protein, 5 aa, Zika virus
GADTG

SEQ ID NO: 372 - protein, 5 aa, Zika virus
GHETD

SEQ ID NO: 373 - protein, 5 aa, Zika virus
GTDGP

SEQ ID NO: 374 - protein, 5 aa, Zika virus
GTPHW

SEQ ID NO: 375 - protein, 5 aa, Zika virus
HETDE

SEQ ID NO: 376 - protein, 5 aa, Zika virus
ITPNS

SEQ ID NO: 377 - protein, 5 aa, Zika virus
KGRLS

SEQ ID NO: 378 - protein, 5 aa, Zika virus
NSPRA

SEQ ID NO: 379 - protein, 5 aa, Zika virus
PNSPR

SEQ ID NO: 380 - protein, 5 aa, Zika virus
PRAEA

SEQ ID NO: 381 - protein, 5 aa, Zika virus
SPRAE

SEQ ID NO: 382 - protein, 5 aa, Zika virus
TDENR

SEQ ID NO: 383 - protein, 5 aa, Zika virus
TESTE

SEQ ID NO: 384 - protein, 5 aa, Zika virus
TGHET

SEQ ID NO: 385 - protein, 5 aa, Zika virus
TGTPH

SEQ ID NO: 386 - protein, 5 aa, Zika virus
TPNSP

SEQ ID NO: 387 - protein, 5 aa, Dengue virus
EPPFG

SEQ ID NO: 388 - protein, 5 aa, Dengue virus
ETQHG

SEQ ID NO: 389 - protein, 5 aa, Dengue virus
KGSSI

SEQ ID NO: 390 - protein, 5 aa, Dengue virus
QEGAM

SEQ ID NO: 391 - protein, 5 aa, Artificial sequence
  Synthetic
GSSIG

SEQ ID NO: 392 - DNA, 1332 bp, Artificial sequence
  Synthetic
atggagaccgacaccctgctgctgtgggtgctgctgctgtgggtgcccggctccaccggcgacacgcgtcaccaccaccaccaccacgactacaaggacgacgacgacaagcgctgcatcggcgtgtccaaccgcgacttcgtggagggcatgtccggcggcacctgggtggacatcgtgctggagcacggcggctgcgtgaccgtgatggcccaggacaagcccaccgtggacatcgagctggtgaccaccaccgtgtccaacatggccgaggtgcgctcctactgctacgaggcctccatctccgacatggcctccgactcccgctgccccacccagggcgaggcctacctggacaagcagtccgacacccagtacgtgtgcaagcgcaccctggtgaacggctggggccgcgacggctgcggcctgttcggcaagggctccctggtgacctgcgccaagttcgcctgctccaagaagatgaccggcaagtccatccagcccgagaacctggagtaccgcatcatgctgtccgtgcacggctcccagcactccggcatgatcgtgcaggacaccggccacgagaccgacgagaaccgcgccaaggtggagatcacccccaactcccccgaggcccgcgccaccctgggcggcttcggctccctgggcctggactgcgagccccgcaccggcctggacttctccgacctgtactacctgaccatgaacaacaagcactggctggtgcacaaggagtggttccacgacatccccctgccctggcacgccggcgagaaggcccccaccccccactggaacaacaaggaggccctggtggagttcaaggacgcccacgccaagcgccagaccgtggtggtgctgggctcccaggagggcgccgtgcacaccgccctggccggcgccctggaggccgagatggacggcgccctgcgcaagggctcctccggccacctgaagtgccgcctgaagatggacaagctgcgcctgaagggcgtgtcctactccctgtgcaccgccgccttcaccttcaccaagatccccgccgagaccctgcacggcaccgtgaccgtggaggtgcagtacgccggcaccgacggcccctgcaaggtgcccgcccagatggccgtggacatgcagaccctgacccccgtgggccgcctgatcaccgccaaccccgtgatcaccaacacctccgaggagtccaagatgatgctggagctggacccccccttcggcgactcctacatcgtgatcggcgtgggcgagaagaagatcacccaccactggcaccgctccggctccaccatctag

SEQ ID NO: 393 - protein, 443 aa, Artificial sequence
  Synthetic
METDTLLLWVLLLWVPGSTGDTRHHHHHHDYKDDDDKRCIGVSNRDFVEGMSGGTWVDIVLEHGGCVTVMAQDKPTVDIELVTTTVSNMAEVRSYCYEASISDMASDSRCPTQGEAYLDKQSDTQYVCKRTLVNGWGRDGCGLFGKGSLVTCAKFACSKKMTGKSIQPENLEYRIMLSVHGSQHSGMIVQDTGHETDENRAKVEITPNSPEARATLGGFGSLGLDCEPRTGLDFSDLYYLTMNNKHWLVHKEWFHDIPLPWHAGEKAPTPHWNNKEALVEFKDAHAKRQTVVVLGSQEGAVHTALAGALEAEMDGALRKGSSGHLKCRLKMDKLRLKGVSYSLCTAAFTFTKIPAETLHGTVTVEVQYAGTDGPCKVPAQMAVDMQTLTPVGRLITANPVITNTSEESKMMLELDPPFGDSYIVIGVGEKKITHHWHRSGSTI

SEQ ID NO: 394 - DNA, 2016 bp, Artificial sequence
  Synthetic
atggagacagacacactcctgctatgggtactgctgctctgggttccaggttccactggtgacacgcgtcgctgcatcggcgtgtccaaccgcgacttcgtggagggcatgtccggcggcacctgggtggacatcgtgctggagcacggcggctgcgtgaccgtgatggcccaggacaagcccaccgtggacatcgagctggtgaccaccaccgtgtccaacatggccgaggtgcgctcctactgctacgaggcctccatctccgacatggcctccgactcccgctgccccacccagggcgaggcctacctggacaagcagtccgacacccagtacgtgtgcaagcgcaccctggtgaacggctggggccgcgacggctgcggcctgttcggcaagggctccctggtgacctgcgccaagttcgcctgctccaagaagatgaccggcaagtccatccagcccgagaacctggagtaccgcatcatgctgtccgtgcacggctcccagcactccggcatgatcgtgcaggacaccggccacgagaccgacgagaaccgcgccaaggtggagatcacccccaactcccccgaggcccgcgccaccctgggcggcttcggctccctgggcctggactgcgagccccgcaccggcctggacttctccgacctgtactacctgaccatgaacaacaagcactggctggtgcacaaggagtggttccacgacatccccctgccctggcacgccggcgagaaggcccccaccccccactggaacaacaaggaggccctggtggagttcaaggacgcccacgccaagcgccagaccgtggtggtgctgggctcccaggagggcgccgtgcacaccgccctggccggcgccctggaggccgagatggacggcgccctgcgcaagggctcctccggccacctgaagtgccgcctgaagatggacaagctgcgcctgaagggcgtgtcctactccctgtgcaccgccgccttcaccttcaccaagatccccgccgagaccctgcacggcaccgtgaccgtggaggtgcagtacgccggcaccgacggcccctgcaaggtgcccgcccagatggccgtggacatgcagaccctgacccccgtgggccgcctgatcaccgccaaccccgtgatcaccaacacctccgaggagtccaagatgatgctggagctggacccccccttcggcgactcctacatcgtgatcggcgtgggcgagaagaagatcacccaccactggcaccgctccggctccaccatcgactacaaggacgacgacgacaaggtcgacgagcccaaatcttgtgacaaaactcacacatgcccaccgtgcccagcacctgaactcctggggggaccgtcagtcttcctcttccccccaaaacccaaggacaccctcatgatctcccggacccctgaggtcacatgcgtggtggtggacgtgagccacgaagaccctgaggtcaagttcaactggtacgtggacggcgtggaggtgcataatgccaagacaaagccgcgggaggagcagtacaacagcacgtaccgtgtggtcagcgtcctcaccgtcctgcaccaggactggctgaatggcaaggagtacaagtgcaaggtctccaacaaagccctcccagcccccatcgagaaaaccatctccaaagccaaagggcagccccgagaaccacaggtgtacaccctgcccccatcccgggaggagatgaccaagaaccaggtcagcctgacctgcctggtcaaaggcttctatcccagcgacatcgccgtggagtgggagagcaatgggcagccggagaacaactacaagaccacgcctcccgtgctggactccgacggctccttcttcctctatagcaagctcaccgtggacaagagcaggtggcagcaggggaacgtcttctcatgctccgtgatgcatgaggctctgcacaaccactacacgcagaagagcctctccctgtctccgggtaaatga

SEQ ID NO: 395 - protein, 671 aa, Artificial sequence
  Synthetic
METDTLLLWVLLLWVPGSTGDTRRCIGVSNRDFVEGMSGGTWVDIVLEHGGCVTVMAQDKPTVDIELVTTTVSNMAEVRSYCYEASISDMASDSRCPTQGEAYLDKQSDTQYVCKRTLVNGWGRDGCGLFGKGSLVTCAKFACSKKMTGKSIQPENLEYRIMLSVHGSQHSGMIVQDTGHETDENRAKVEITPNSPEARATLGGFGSLGLDCEPRTGLDFSDLYYLTMNNKHWLVHKEWFHDIPLPWHAGEKAPTPHWNNKEALVEFKDAHAKRQTVVVLGSQEGAVHTALAGALEAEMDGALRKGSSGHLKCRLKMDKLRLKGVSYSLCTAAFTFTKIPAETLHGTVTVEVQYAGTDGPCKVPAQMAVDMQTLTPVGRLITANPVITNTSEESKMMLELDPPFGDSYIVIGVGEKKITHHWHRSGSTIDYKDDDDKVDEPKSCDKTHTCPPCPAPELLGGPSVFLFPPKPKDTLMISRTPEVTCVVVDVSHEDPEVKFNWYVDGVEVHNAKTKPREEQYNSTYRVVSVLTVLHQDWLNGKEYKCKVSNKALPAPIEKTISKAKGQPREPQVYTLPPSREEMTKNQVSLTCLVKGFYPSDIAVEWESNGQPENNYKTTPPVLDSDGSFFLYSKLTVDKSRWQQGNVFSCSVMHEALHNHYTQKSLSLSPGK

SEQ ID NO: 396 - DNA, 2037 bp, Artificial sequence
  Synthetic
atggagacagacacactcctgctatgggtactgctgctctgggttccaggttccactggtgacacgcgtcatcaccatcaccatcaccgctgcatcggcgtgtccaaccgcgacttcgtggagggcatgtccggcggcacctgggtggacatcgtgctggagcacggcggctgcgtgaccgtgatggcccaggacaagcccaccgtggacatcgagctggtgaccaccaccgtgtccaacatggccgaggtgcgctcctactgctacgaggcctccatctccgacatggcctccgactcccgctgccccacccagggcgaggcctacctggacaagcagtccgacacccagtacgtgtgcaagcgcaccctggtgaacggctggggccgcgacggctgcggcctgttcggcaagggctccctggtgacctgcgccaagttcgcctgctccaagaagatgaccggcaagtccatccagcccgagaacctggagtaccgcatcatgctgtccgtgcacggctcccagcactccggcatgatcgtgcaggacaccggccacgagaccgacgagaaccgcgccaaggtggagatcacccccaactcccccgaggcccgcgccaccctgggcggcttcggctccctgggcctggactgcgagccccgcaccggcctggacttctccgacctgtactacctgaccatgaacaacaagcactggctggtgcacaaggagtggttccacgacatccccctgccctggcacgccggcgagaaggcccccaccccccactggaacaacaaggaggccctggtggagttcaaggacgcccacgccaagcgccagaccgtggtggtgctgggctcccaggagggcgccgtgcacaccgccctggccggcgccctggaggccgagatggacggcgccctgcgcaagggctcctccggccacctgaagtgccgcctgaagatggacaagctgcgcctgaagggcgtgtcctactccctgtgcaccgccgccttcaccttcaccaagatccccgccgagaccctgcacggcaccgtgaccgtggaggtgcagtacgccggcaccgacggcccctgcaaggtgcccgcccagatggccgtggacatgcagaccctgacccccgtgggccgcctgatcaccgccaaccccgtgatcaccaacacctccgaggagtccaagatgatgctggagctggacccccccttcggcgactcctacatcgtgatcggcgtgggcgagaagaagatcacccaccactggcaccgctccggctccaccatcgactacaaggacgacgacgacaaggtcgacgagcccagagggcccacaatcaagccctgtcctccatgcaaatgcccagcacctaacctcttgggtggaccatccgtcttcatcttccctccaaagatcaaggatgtactcatgatctccctgagccccatagtcacatgtgtggtggtggatgtgagcgaggatgacccagatgtccagatcagctggtttgtgaacaacgtggaagtacacacagctcagacacaaacccatagagaggattacaacagtactctccgggtggtcagtgccctccccatccagcaccaggactggatgagtggcaaggagttcaaatgcaaggtcaacaacaaagacctcccagcgcccatcgagagaaccatctcaaaacccaaagggtcagtaagagctccacaggtatatgtcttgcctccaccagaagaagagatgactaagaaacaggtcactctgacctgcatggtcacagacttcatgcctgaagacatttacgtggagtggaccaacaacgggaaaacagagctaaactacaagaacactgaaccagtcctggactctgatggttcttacttcatgtacagcaagctgagagtggaaaagaagaactgggtggaaagaaatagctactcctgttcagtggtccacgagggtctgcacaatcaccacacgactaagagcttctcccggactccgggtaaatag

SEQ ID NO: 397 - protein, 678 aa, Artificial sequence
  Synthetic
METDTLLLWVLLLWVPGSTGDTRHHHHHHRCIGVSNRDFVEGMSGGTWVDIVLEHGGCVTVMAQDKPTVDIELVTTTVSNMAEVRSYCYEASISDMASDSRCPTQGEAYLDKQSDTQYVCKRTLVNGWGRDGCGLFGKGSLVTCAKFACSKKMTGKSIQPENLEYRIMLSVHGSQHSGMIVQDTGHETDENRAKVEITPNSPEARATLGGFGSLGLDCEPRTGLDFSDLYYLTMNNKHWLVHKEWFHDIPLPWHAGEKAPTPHWNNKEALVEFKDAHAKRQTVVVLGSQEGAVHTALAGALEAEMDGALRKGSSGHLKCRLKMDKLRLKGVSYSLCTAAFTFTKIPAETLHGTVTVEVQYAGTDGPCKVPAQMAVDMQTLTPVGRLITANPVITNTSEESKMMLELDPPFGDSYIVIGVGEKKITHHWHRSGSTIDYKDDDDKVDEPRGPTIKPCPPCKCPAPNLLGGPSVFIFPPKIKDVLMISLSPIVTCVVVDVSEDDPDVQISWFVNNVEVHTAQTQTHREDYNSTLRVVSALPIQHQDWMSGKEFKCKVNNKDLPAPIERTISKPKGSVRAPQVYVLPPPEEEMTKKQVTLTCMVTDFMPEDIYVEWTNNGKTELNYKNTEPVLDSDGSYFMYSKLRVEKKNWVERNSYSCSVVHEGLHNHHTTKSFSRTPGK

SEQ ID NO: 398 - DNA, 1539 bp, Artificial sequence
  Synthetic
atggagacagacacactcctgctatgggtactgctgctctgggttccaggttccactggtgacacgcgtcatcaccatcaccatcacgtgggcatcaccatgccccgcaccaagccctccgcccccgccggcgccctgaagacccccggcaccggcaagaccgacgacgccaaggtgtccgagaagggccgcctgtcccccaaggcctcccaggtgaagcgctccccctccgacgccggccgctcctccggcgacgagtccaagaagcccctgccctcctcctcccgcacccccaccgccaacgccaactccttcggcttcaagaagcagtccggctccgccgccggcctggccatgatcaccgcctccggcgtgaccgtgacctcccgctccgccaccctgggcaagatccccaagtcctccgccctggtgtcccgctccgccggccgcaagtcctccatggacggcgcccagaaccaggacgacggctacctggccctgtcctcccgcaccaacctgcagtaccgctccctgccccgcccctccaagtccaactcccgcaacggcgccggcaaccgctcctccacctcctccatcgactccaacatctcctccaagtccgccggcctgcccgtgcccaagctgcgcgagccctccaagaccgccctgggctcctccctgcccggcctggtgaaccagaccgacaaggagaagggcatctcctccgacaacgagtccgtggcctcctgcaactccgtgaaggtgaaccccgccgcccagcccgtgtcctcccccgcccagacctccgactacaaggacgacgacgacaaggtcgacgagcccagagggcccacaatcaagccctgtcctccatgcaaatgcccagcacctaacctcttgggtggaccatccgtcttcatcttccctccaaagatcaaggatgtactcatgatctccctgagccccatagtcacatgtgtggtggtggatgtgagcgaggatgacccagatgtccagatcagctggtttgtgaacaacgtggaagtacacacagctcagacacaaacccatagagaggattacaacagtactctccgggtggtcagtgccctccccatccagcaccaggactggatgagtggcaaggagttcaaatgcaaggtcaacaacaaagacctcccagcgcccatcgagagaaccatctcaaaacccaaagggtcagtaagagctccacaggtatatgtcttgcctccaccagaagaagagatgactaagaaacaggtcactctgacctgcatggtcacagacttcatgcctgaagacatttacgtggagtggaccaacaacgggaaaacagagctaaactacaagaacactgaaccagtcctggactctgatggttcttacttcatgtacagcaagctgagagtggaaaagaagaactgggtggaaagaaatagctactcctgttcagtggtccacgagggtctgcacaatcaccacacgactaagagcttctcccggactccgggtaaatag

SEQ ID NO: 399 - protein, 512 aa, Artificial sequence
  Synthetic
METDTLLLWVLLLWVPGSTGDTRHHHHHHVGITMPRTKPSAPAGALKTPGTGKTDDAKVSEKGRLSPKASQVKRSPSDAGRSSGDESKKPLPSSSRTPTANANSFGFKKQSGSAAGLAMITASGVTVTSRSATLGKIPKSSALVSRSAGRKSSMDGAQNQDDGYLALSSRTNLQYRSLPRPSKSNSRNGAGNRSSTSSIDSNISSKSAGLPVPKLREPSKTALGSSLPGLVNQTDKEKGISSDNESVASCNSVKVNPAAQPVSSPAQTSDYKDDDDKVDEPRGPTIKPCPPCKCPAPNLLGGPSVFIFPPKIKDVLMISLSPIVTCVVVDVSEDDPDVQISWFVNNVEVHTAQTQTHREDYNSTLRVVSALPIQHQDWMSGKEFKCKVNNKDLPAPIERTISKPKGSVRAPQVYVLPPPEEEMTKKQVTLTCMVTDFMPEDIYVEWTNNGKTELNYKNTEPVLDSDGSYFMYSKLRVEKKNWVERNSYSCSVVHEGLHNHHTTKSFSRTPGK

SEQ ID NO: 400 - DNA, 1539 bp, Artificial sequence
  Synthetic
atggagacagacacactcctgctatgggtactgctgctctgggttccaggttccactggtgacacgcgtcatcaccatcaccatcacgtgggcatcaccatgccccgcaccaagccctccgcccccgccggcgccctgaagacccccggcaccggcaagaccgacgacgccaaggtgtccgagctgcgcaagggctcccccaaggcctcccaggtgaagcgctccccctccgacgccggccgctcctccggcgacgagtccaagaagcccctgccctcctcctcccgcacccccaccgccaacgccaactccttcggcttcaagaagcagtccggctccgccgccggcctggccatgatcaccgcctccggcgtgaccgtgacctcccgctccgccaccctgggcaagatccccaagtcctccgccctggtgtcccgctccgccggccgcaagtcctccatggacggcgcccagaaccaggacgacggctacctggccctgtcctcccgcaccaacctgcagtaccgctccctgccccgcccctccaagtccaactcccgcaacggcgccggcaaccgctcctccacctcctccatcgactccaacatctcctccaagtccgccggcctgcccgtgcccaagctgcgcgagccctccaagaccgccctgggctcctccctgcccggcctggtgaaccagaccgacaaggagaagggcatctcctccgacaacgagtccgtggcctcctgcaactccgtgaaggtgaaccccgccgcccagcccgtgtcctcccccgcccagacctccgactacaaggacgacgacgacaaggtcgacgagcccagagggcccacaatcaagccctgtcctccatgcaaatgcccagcacctaacctcttgggtggaccatccgtcttcatcttccctccaaagatcaaggatgtactcatgatctccctgagccccatagtcacatgtgtggtggtggatgtgagcgaggatgacccagatgtccagatcagctggtttgtgaacaacgtggaagtacacacagctcagacacaaacccatagagaggattacaacagtactctccgggtggtcagtgccctccccatccagcaccaggactggatgagtggcaaggagttcaaatgcaaggtcaacaacaaagacctcccagcgcccatcgagagaaccatctcaaaacccaaagggtcagtaagagctccacaggtatatgtcttgcctccaccagaagaagagatgactaagaaacaggtcactctgacctgcatggtcacagacttcatgcctgaagacatttacgtggagtggaccaacaacgggaaaacagagctaaactacaagaacactgaaccagtcctggactctgatggttcttacttcatgtacagcaagctgagagtggaaaagaagaactgggtggaaagaaatagctactcctgttcagtggtccacgagggtctgcacaatcaccacacgactaagagcttctcccggactccgggtaaatag

SEQ ID NO: 401 - protein, 512 aa, Artificial sequence
  Synthetic
METDTLLLWVLLLWVPGSTGDTRHHHHHHVGITMPRTKPSAPAGALKTPGTGKTDDAKVSELRKGSPKASQVKRSPSDAGRSSGDESKKPLPSSSRTPTANANSFGFKKQSGSAAGLAMITASGVTVTSRSATLGKIPKSSALVSRSAGRKSSMDGAQNQDDGYLALSSRTNLQYRSLPRPSKSNSRNGAGNRSSTSSIDSNISSKSAGLPVPKLREPSKTALGSSLPGLVNQTDKEKGISSDNESVASCNSVKVNPAAQPVSSPAQTSDYKDDDDKVDEPRGPTIKPCPPCKCPAPNLLGGPSVFIFPPKIKDVLMISLSPIVTCVVVDVSEDDPDVQISWFVNNVEVHTAQTQTHREDYNSTLRVVSALPIQHQDWMSGKEFKCKVNNKDLPAPIERTISKPKGSVRAPQVYVLPPPEEEMTKKQVTLTCMVTDFMPEDIYVEWTNNGKTELNYKNTEPVLDSDGSYFMYSKLRVEKKNWVERNSYSCSVVHEGLHNHHTTKSFSRTPGK

SEQ ID NO: 402 - DNA, 1539 bp, Artificial sequence
  Synthetic
atggagacagacacactcctgctatgggtactgctgctctgggttccaggttccactggtgacacgcgtcatcaccatcaccatcacgtgggcatcaccatgccccgcaccaagccctccgcccccgccggcgccctgaagacccccggcaccggcaagaccgacgacgccaaggtgtccgagaagggccgcctgtcccccaaggcctcccaggtgaagcgctccccctccgacgccggccgctcctccggcgacgagtccaagaagcccctgccctcctcctcccgcacccccaccgccaacgccaactccttcggcttcaagaagcagtccggctccgccgccggcctggccatgatcaccgcctccggcgtgaccgtgacctcccgctccgccaccctgggcaagatccccaagtcctccgccctggtgtcccgctccgccggccgcaagtcctccatggacggcgcccagaaccaggacgacggctacctggccctgtcctcccgcaccaacctgcagtaccgctccctgccccgcccctccaagtccaactcccgcaacggcgccggcaaccgctcctccacctcctccatcgactccaacatctcctccaagtccgccggcctgcccgtgcccaagctgcgcgagccctccaagaccgccctgggctcctccctgcccggcctggtgaaccaggacacccgcgagaagggcatctcctccgacaacgagtccgtggcctcctgcaactccgtgaaggtgaaccccgccgcccagcccgtgtcctcccccgcccagacctccgactacaaggacgacgacgacaaggtcgacgagcccagagggcccacaatcaagccctgtcctccatgcaaatgcccagcacctaacctcttgggtggaccatccgtcttcatcttccctccaaagatcaaggatgtactcatgatctccctgagccccatagtcacatgtgtggtggtggatgtgagcgaggatgacccagatgtccagatcagctggtttgtgaacaacgtggaagtacacacagctcagacacaaacccatagagaggattacaacagtactctccgggtggtcagtgccctccccatccagcaccaggactggatgagtggcaaggagttcaaatgcaaggtcaacaacaaagacctcccagcgcccatcgagagaaccatctcaaaacccaaagggtcagtaagagctccacaggtatatgtcttgcctccaccagaagaagagatgactaagaaacaggtcactctgacctgcatggtcacagacttcatgcctgaagacatttacgtggagtggaccaacaacgggaaaacagagctaaactacaagaacactgaaccagtcctggactctgatggttcttacttcatgtacagcaagctgagagtggaaaagaagaactgggtggaaagaaatagctactcctgttcagtggtccacgagggtctgcacaatcaccacacgactaagagcttctcccggactccgggtaaatag

SEQ ID NO: 403 - protein, 512 aa, Artificial sequence
  Synthetic
METDTLLLWVLLLWVPGSTGDTRHHHHHHVGITMPRTKPSAPAGALKTPGTGKTDDAKVSEKGRLSPKASQVKRSPSDAGRSSGDESKKPLPSSSRTPTANANSFGFKKQSGSAAGLAMITASGVTVTSRSATLGKIPKSSALVSRSAGRKSSMDGAQNQDDGYLALSSRTNLQYRSLPRPSKSNSRNGAGNRSSTSSIDSNISSKSAGLPVPKLREPSKTALGSSLPGLVNQDTREKGISSDNESVASCNSVKVNPAAQPVSSPAQTSDYKDDDDKVDEPRGPTIKPCPPCKCPAPNLLGGPSVFIFPPKIKDVLMISLSPIVTCVVVDVSEDDPDVQISWFVNNVEVHTAQTQTHREDYNSTLRVVSALPIQHQDWMSGKEFKCKVNNKDLPAPIERTISKPKGSVRAPQVYVLPPPEEEMTKKQVTLTCMVTDFMPEDIYVEWTNNGKTELNYKNTEPVLDSDGSYFMYSKLRVEKKNWVERNSYSCSVVHEGLHNHHTTKSFSRTPGK

SEQ ID NO: 404 - DNA, 1539 bp, Artificial sequence
  Synthetic
atggagacagacacactcctgctatgggtactgctgctctgggttccaggttccactggtgacacgcgtcatcaccatcaccatcacgtgggcatcaccatgccccgcaccaagccctccgcccccgccggcgccctgaagacccccggcaccggcaagaccgacgacgccaaggtgtccgagtccaccaacgacgaccccaaggcctcccaggtgaagcgctccccctccgacgccggccgctcctccggcgacgagtccaagaagcccctgccctcctcctcccgcacccccaccgccaacgccaactccttcggcttcaagaagcagtccggctccgccgccggcctggccatgatcaccgcctccggcgtgaccgtgacctcccgctccgccaccctgggcaagatccccaagtcctccgccctggtgtcccgctccgccggccgcaagtcctccatggacggcgcccagaaccaggacgacggctacctggccctgtcctcccgcaccaacctgcagtaccgctccctgccccgcccctccaagtccaactcccgcaacggcgccggcaaccgctcctccacctcctccatcgactccaacatctcctccaagtccgccggcctgcccgtgcccaagctgcgcgagccctccaagaccgccctgggctcctccctgcccggcctggtgaaccaggacacccgcgagaagggcatctcctccgacaacgagtccgtggcctcctgcaactccgtgaaggtgaaccccgccgcccagcccgtgtcctcccccgcccagacctccgactacaaggacgacgacgacaaggtcgacgagcccagagggcccacaatcaagccctgtcctccatgcaaatgcccagcacctaacctcttgggtggaccatccgtcttcatcttccctccaaagatcaaggatgtactcatgatctccctgagccccatagtcacatgtgtggtggtggatgtgagcgaggatgacccagatgtccagatcagctggtttgtgaacaacgtggaagtacacacagctcagacacaaacccatagagaggattacaacagtactctccgggtggtcagtgccctccccatccagcaccaggactggatgagtggcaaggagttcaaatgcaaggtcaacaacaaagacctcccagcgcccatcgagagaaccatctcaaaacccaaagggtcagtaagagctccacaggtatatgtcttgcctccaccagaagaagagatgactaagaaacaggtcactctgacctgcatggtcacagacttcatgcctgaagacatttacgtggagtggaccaacaacgggaaaacagagctaaactacaagaacactgaaccagtcctggactctgatggttcttacttcatgtacagcaagctgagagtggaaaagaagaactgggtggaaagaaatagctactcctgttcagtggtccacgagggtctgcacaatcaccacacgactaagagcttctcccggactccgggtaaatag

SEQ ID NO: 405 - protein, 512 aa, Artificial sequence
  Synthetic
METDTLLLWVLLLWVPGSTGDTRHHHHHHVGITMPRTKPSAPAGALKTPGTGKTDDAKVSESTNDDPKASQVKRSPSDAGRSSGDESKKPLPSSSRTPTANANSFGFKKQSGSAAGLAMITASGVTVTSRSATLGKIPKSSALVSRSAGRKSSMDGAQNQDDGYLALSSRTNLQYRSLPRPSKSNSRNGAGNRSSTSSIDSNISSKSAGLPVPKLREPSKTALGSSLPGLVNQDTREKGISSDNESVASCNSVKVNPAAQPVSSPAQTSDYKDDDDKVDEPRGPTIKPCPPCKCPAPNLLGGPSVFIFPPKIKDVLMISLSPIVTCVVVDVSEDDPDVQISWFVNNVEVHTAQTQTHREDYNSTLRVVSALPIQHQDWMSGKEFKCKVNNKDLPAPIERTISKPKGSVRAPQVYVLPPPEEEMTKKQVTLTCMVTDFMPEDIYVEWTNNGKTELNYKNTEPVLDSDGSYFMYSKLRVEKKNWVERNSYSCSVVHEGLHNHHTTKSFSRTPGK

SEQ ID NO: 406 - DNA, 1569 bp, Artificial sequence
  Synthetic
atggagacagacacactcctgctatgggtactgctgctctgggttccaggttccactggtgacacgcgtcatcaccatcaccatcacgtgggcatcaccatgccccgcaccaagccctccgcccccgccggcgccctgaagacccccggcaccggcaagaccgacgacgccaaggtgtccgagtccaaggacgtgcagctgaagaacatcaccgactacatgtacctgcccaaggcctcccaggtgaagcgctccccctccgacgccggccgctcctccggcgacgagtccaagaagcccctgccctcctcctcccgcacccccaccgccaacgccaactccttcggcttcaagaagcagtccggctccgccgccggcctggccatgatcaccgcctccggcgtgaccgtgacctcccgctccgccaccctgggcaagatccccaagtcctccgccctggtgtcccgctccgccggccgcaagtcctccatggacggcgcccagaaccaggacgacggctacctggccctgtcctcccgcaccaacctgcagtaccgctccctgccccgcccctccaagtccaactcccgcaacggcgccggcaaccgctcctccacctcctccatcgactccaacatctcctccaagtccgccggcctgcccgtgcccaagctgcgcgagccctccaagaccgccctgggctcctccctgcccggcctggtgaaccaggacacccgcgagaagggcatctcctccgacaacgagtccgtggcctcctgcaactccgtgaaggtgaaccccgccgcccagcccgtgtcctcccccgcccagacctccgactacaaggacgacgacgacaaggtcgacgagcccagagggcccacaatcaagccctgtcctccatgcaaatgcccagcacctaacctcttgggtggaccatccgtcttcatcttccctccaaagatcaaggatgtactcatgatctccctgagccccatagtcacatgtgtggtggtggatgtgagcgaggatgacccagatgtccagatcagctggtttgtgaacaacgtggaagtacacacagctcagacacaaacccatagagaggattacaacagtactctccgggtggtcagtgccctccccatccagcaccaggactggatgagtggcaaggagttcaaatgcaaggtcaacaacaaagacctcccagcgcccatcgagagaaccatctcaaaacccaaagggtcagtaagagctccacaggtatatgtcttgcctccaccagaagaagagatgactaagaaacaggtcactctgacctgcatggtcacagacttcatgcctgaagacatttacgtggagtggaccaacaacgggaaaacagagctaaactacaagaacactgaaccagtcctggactctgatggttcttacttcatgtacagcaagctgagagtggaaaagaagaactgggtggaaagaaatagctactcctgttcagtggtccacgagggtctgcacaatcaccacacgactaagagcttctcccggactccgggtaaatag

SEQ ID NO: 407 - protein, 522 aa, Artificial sequence
  Synthetic
METDTLLLWVLLLWVPGSTGDTRHHHHHHVGITMPRTKPSAPAGALKTPGTGKTDDAKVSESKDVQLKNITDYMYLPKASQVKRSPSDAGRSSGDESKKPLPSSSRTPTANANSFGFKKQSGSAAGLAMITASGVTVTSRSATLGKIPKSSALVSRSAGRKSSMDGAQNQDDGYLALSSRTNLQYRSLPRPSKSNSRNGAGNRSSTSSIDSNISSKSAGLPVPKLREPSKTALGSSLPGLVNQDTREKGISSDNESVASCNSVKVNPAAQPVSSPAQTSDYKDDDDKVDEPRGPTIKPCPPCKCPAPNLLGGPSVFIFPPKIKDVLMISLSPIVTCVVVDVSEDDPDVQISWFVNNVEVHTAQTQTHREDYNSTLRVVSALPIQHQDWMSGKEFKCKVNNKDLPAPIERTISKPKGSVRAPQVYVLPPPEEEMTKKQVTLTCMVTDFMPEDIYVEWTNNGKTELNYKNTEPVLDSDGSYFMYSKLRVEKKNWVERNSYSCSVVHEGLHNHHTTKSFSRTPGK

SEQ ID NO: 408 - DNA, 1542 bp, Artificial sequence
  Synthetic
atggagacagacacactcctgctatgggtactgctgctctgggttccaggttccactggtgacacgcgtgagcccagagggcccacaatcaagccctgtcctccatgcaaatgcccagcacctaacctcttgggtggaccatccgtcttcatcttccctccaaagatcaaggatgtactcatgatctccctgagccccatagtcacatgtgtggtggtggatgtgagcgaggatgacccagatgtccagatcagctggtttgtgaacaacgtggaagtacacacagctcagacacaaacccatagagaggattacaacagtactctccgggtggtcagtgccctccccatccagcaccaggactggatgagtggcaaggagttcaaatgcaaggtcaacaacaaagacctcccagcgcccatcgagagaaccatctcaaaacccaaagggtcagtaagagctccacaggtatatgtcttgcctccaccagaagaagagatgactaagaaacaggtcactctgacctgcatggtcacagacttcatgcctgaagacatttacgtggagtggaccaacaacgggaaaacagagctaaactacaagaacactgaaccagtcctggactctgatggttcttacttcatgtacagcaagctgagagtggaaaagaagaactgggtggaaagaaatagctactcctgttcagtggtccacgagggtctgcacaatcaccacacgactaagagcttctcccggactccgggtaaagcggccgcagactacaaggacgacgacgacaaggtgggcatcaccatgccccgcaccaagccctccgcccccgccggcgccctgaagacccccggcaccggcaagaccgacgacgccaaggtgtccgagaagggccgcctgtcccccaaggcctcccaggtgaagcgctccccctccgacgccggccgctcctccggcgacgagtccaagaagcccctgccctcctcctcccgcacccccaccgccaacgccaactccttcggcttcaagaagcagtccggctccgccgccggcctggccatgatcaccgcctccggcgtgaccgtgacctcccgctccgccaccctgggcaagatccccaagtcctccgccctggtgtcccgctccgccggccgcaagtcctccatggacggcgcccagaaccaggacgacggctacctggccctgtcctcccgcaccaacctgcagtaccgctccctgccccgcccctccaagtccaactcccgcaacggcgccggcaaccgctcctccacctcctccatcgactccaacatctcctccaagtccgccggcctgcccgtgcccaagctgcgcgagccctccaagaccgccctgggctcctccctgcccggcctggtgaaccagaccgacaaggagaagggcatctcctccgacaacgagtccgtggcctcctgcaactccgtgaaggtgaaccccgccgcccagcccgtgtcctcccccgcccagacctcccatcaccatcaccatcactag

SEQ ID NO: 409 - protein, 513 aa, Artificial sequence
  Synthetic
METDTLLLWVLLLWVPGSTGDTREPRGPTIKPCPPCKCPAPNLLGGPSVFIFPPKIKDVLMISLSPIVTCVVVDVSEDDPDVQISWFVNNVEVHTAQTQTHREDYNSTLRVVSALPIQHQDWMSGKEFKCKVNNKDLPAPIERTISKPKGSVRAPQVYVLPPPEEEMTKKQVTLTCMVTDFMPEDIYVEWTNNGKTELNYKNTEPVLDSDGSYFMYSKLRVEKKNWVERNSYSCSVVHEGLHNHHTTKSFSRTPGKAAADYKDDDDKVGITMPRTKPSAPAGALKTPGTGKTDDAKVSEKGRLSPKASQVKRSPSDAGRSSGDESKKPLPSSSRTPTANANSFGFKKQSGSAAGLAMITASGVTVTSRSATLGKIPKSSALVSRSAGRKSSMDGAQNQDDGYLALSSRTNLQYRSLPRPSKSNSRNGAGNRSSTSSIDSNISSKSAGLPVPKLREPSKTALGSSLPGLVNQTDKEKGISSDNESVASCNSVKVNPAAQPVSSPAQTSHHHHHH

SEQ ID NO: 410 - DNA, 1542 bp, Artificial sequence
  Synthetic
atggagacagacacactcctgctatgggtactgctgctctgggttccaggttccactggtgacacgcgtgagcccagagggcccacaatcaagccctgtcctccatgcaaatgcccagcacctaacctcttgggtggaccatccgtcttcatcttccctccaaagatcaaggatgtactcatgatctccctgagccccatagtcacatgtgtggtggtggatgtgagcgaggatgacccagatgtccagatcagctggtttgtgaacaacgtggaagtacacacagctcagacacaaacccatagagaggattacaacagtactctccgggtggtcagtgccctccccatccagcaccaggactggatgagtggcaaggagttcaaatgcaaggtcaacaacaaagacctcccagcgcccatcgagagaaccatctcaaaacccaaagggtcagtaagagctccacaggtatatgtcttgcctccaccagaagaagagatgactaagaaacaggtcactctgacctgcatggtcacagacttcatgcctgaagacatttacgtggagtggaccaacaacgggaaaacagagctaaactacaagaacactgaaccagtcctggactctgatggttcttacttcatgtacagcaagctgagagtggaaaagaagaactgggtggaaagaaatagctactcctgttcagtggtccacgagggtctgcacaatcaccacacgactaagagcttctcccggactccgggtaaagcggccgcagactacaaggacgacgacgacaaggtgggcatcaccatgccccgcaccaagccctccgcccccgccggcgccctgaagacccccggcaccggcaagaccgacgacgccaaggtgtccgagctgcgcaagggctcccccaaggcctcccaggtgaagcgctccccctccgacgccggccgctcctccggcgacgagtccaagaagcccctgccctcctcctcccgcacccccaccgccaacgccaactccttcggcttcaagaagcagtccggctccgccgccggcctggccatgatcaccgcctccggcgtgaccgtgacctcccgctccgccaccctgggcaagatccccaagtcctccgccctggtgtcccgctccgccggccgcaagtcctccatggacggcgcccagaaccaggacgacggctacctggccctgtcctcccgcaccaacctgcagtaccgctccctgccccgcccctccaagtccaactcccgcaacggcgccggcaaccgctcctccacctcctccatcgactccaacatctcctccaagtccgccggcctgcccgtgcccaagctgcgcgagccctccaagaccgccctgggctcctccctgcccggcctggtgaaccagaccgacaaggagaagggcatctcctccgacaacgagtccgtggcctcctgcaactccgtgaaggtgaaccccgccgcccagcccgtgtcctcccccgcccagacctcccatcaccatcaccatcactag

SEQ ID NO: 411 - protein, 513 aa, Artificial sequence
  Synthetic
METDTLLLWVLLLWVPGSTGDTREPRGPTIKPCPPCKCPAPNLLGGPSVFIFPPKIKDVLMISLSPIVTCVVVDVSEDDPDVQISWFVNNVEVHTAQTQTHREDYNSTLRVVSALPIQHQDWMSGKEFKCKVNNKDLPAPIERTISKPKGSVRAPQVYVLPPPEEEMTKKQVTLTCMVTDFMPEDIYVEWTNNGKTELNYKNTEPVLDSDGSYFMYSKLRVEKKNWVERNSYSCSVVHEGLHNHHTTKSFSRTPGKAAADYKDDDDKVGITMPRTKPSAPAGALKTPGTGKTDDAKVSELRKGSPKASQVKRSPSDAGRSSGDESKKPLPSSSRTPTANANSFGFKKQSGSAAGLAMITASGVTVTSRSATLGKIPKSSALVSRSAGRKSSMDGAQNQDDGYLALSSRTNLQYRSLPRPSKSNSRNGAGNRSSTSSIDSNISSKSAGLPVPKLREPSKTALGSSLPGLVNQTDKEKGISSDNESVASCNSVKVNPAAQPVSSPAQTSHHHHHH

SEQ ID NO: 412 - DNA, 1542 bp, Artificial sequence
  Synthetic
atggagacagacacactcctgctatgggtactgctgctctgggttccaggttccactggtgacacgcgtgagcccagagggcccacaatcaagccctgtcctccatgcaaatgcccagcacctaacctcttgggtggaccatccgtcttcatcttccctccaaagatcaaggatgtactcatgatctccctgagccccatagtcacatgtgtggtggtggatgtgagcgaggatgacccagatgtccagatcagctggtttgtgaacaacgtggaagtacacacagctcagacacaaacccatagagaggattacaacagtactctccgggtggtcagtgccctccccatccagcaccaggactggatgagtggcaaggagttcaaatgcaaggtcaacaacaaagacctcccagcgcccatcgagagaaccatctcaaaacccaaagggtcagtaagagctccacaggtatatgtcttgcctccaccagaagaagagatgactaagaaacaggtcactctgacctgcatggtcacagacttcatgcctgaagacatttacgtggagtggaccaacaacgggaaaacagagctaaactacaagaacactgaaccagtcctggactctgatggttcttacttcatgtacagcaagctgagagtggaaaagaagaactgggtggaaagaaatagctactcctgttcagtggtccacgagggtctgcacaatcaccacacgactaagagcttctcccggactccgggtaaagcggccgcagactacaaggacgacgacgacaaggtgggcatcaccatgccccgcaccaagccctccgcccccgccggcgccctgaagacccccggcaccggcaagaccgacgacgccaaggtgtccgagaagggccgcctgtcccccaaggcctcccaggtgaagcgctccccctccgacgccggccgctcctccggcgacgagtccaagaagcccctgccctcctcctcccgcacccccaccgccaacgccaactccttcggcttcaagaagcagtccggctccgccgccggcctggccatgatcaccgcctccggcgtgaccgtgacctcccgctccgccaccctgggcaagatccccaagtcctccgccctggtgtcccgctccgccggccgcaagtcctccatggacggcgcccagaaccaggacgacggctacctggccctgtcctcccgcaccaacctgcagtaccgctccctgccccgcccctccaagtccaactcccgcaacggcgccggcaaccgctcctccacctcctccatcgactccaacatctcctccaagtccgccggcctgcccgtgcccaagctgcgcgagccctccaagaccgccctgggctcctccctgcccggcctggtgaaccaggacacccgcgagaagggcatctcctccgacaacgagtccgtggcctcctgcaactccgtgaaggtgaaccccgccgcccagcccgtgtcctcccccgcccagacctcccatcaccatcaccatcactag

SEQ ID NO: 413 - protein, 513 aa, Artificial sequence
  Synthetic
METDTLLLWVLLLWVPGSTGDTREPRGPTIKPCPPCKCPAPNLLGGPSVFIFPPKIKDVLMISLSPIVTCVVVDVSEDDPDVQISWFVNNVEVHTAQTQTHREDYNSTLRVVSALPIQHQDWMSGKEFKCKVNNKDLPAPIERTISKPKGSVRAPQVYVLPPPEEEMTKKQVTLTCMVTDFMPEDIYVEWTNNGKTELNYKNTEPVLDSDGSYFMYSKLRVEKKNWVERNSYSCSVVHEGLHNHHTTKSFSRTPGKAAADYKDDDDKVGITMPRTKPSAPAGALKTPGTGKTDDAKVSEKGRLSPKASQVKRSPSDAGRSSGDESKKPLPSSSRTPTANANSFGFKKQSGSAAGLAMITASGVTVTSRSATLGKIPKSSALVSRSAGRKSSMDGAQNQDDGYLALSSRTNLQYRSLPRPSKSNSRNGAGNRSSTSSIDSNISSKSAGLPVPKLREPSKTALGSSLPGLVNQDTREKGISSDNESVASCNSVKVNPAAQPVSSPAQTSHHHHHH

SEQ ID NO: 414 - DNA, 1542 bp, Artificial sequence
  Synthetic
atggagacagacacactcctgctatgggtactgctgctctgggttccaggttccactggtgacacgcgtgagcccagagggcccacaatcaagccctgtcctccatgcaaatgcccagcacctaacctcttgggtggaccatccgtcttcatcttccctccaaagatcaaggatgtactcatgatctccctgagccccatagtcacatgtgtggtggtggatgtgagcgaggatgacccagatgtccagatcagctggtttgtgaacaacgtggaagtacacacagctcagacacaaacccatagagaggattacaacagtactctccgggtggtcagtgccctccccatccagcaccaggactggatgagtggcaaggagttcaaatgcaaggtcaacaacaaagacctcccagcgcccatcgagagaaccatctcaaaacccaaagggtcagtaagagctccacaggtatatgtcttgcctccaccagaagaagagatgactaagaaacaggtcactctgacctgcatggtcacagacttcatgcctgaagacatttacgtggagtggaccaacaacgggaaaacagagctaaactacaagaacactgaaccagtcctggactctgatggttcttacttcatgtacagcaagctgagagtggaaaagaagaactgggtggaaagaaatagctactcctgttcagtggtccacgagggtctgcacaatcaccacacgactaagagcttctcccggactccgggtaaagcggccgcagactacaaggacgacgacgacaaggtgggcatcaccatgccccgcaccaagccctccgcccccgccggcgccctgaagacccccggcaccggcaagaccgacgacgccaaggtgtccgagtccaccaacgacgaccccaaggcctcccaggtgaagcgctccccctccgacgccggccgctcctccggcgacgagtccaagaagcccctgccctcctcctcccgcacccccaccgccaacgccaactccttcggcttcaagaagcagtccggctccgccgccggcctggccatgatcaccgcctccggcgtgaccgtgacctcccgctccgccaccctgggcaagatccccaagtcctccgccctggtgtcccgctccgccggccgcaagtcctccatggacggcgcccagaaccaggacgacggctacctggccctgtcctcccgcaccaacctgcagtaccgctccctgccccgcccctccaagtccaactcccgcaacggcgccggcaaccgctcctccacctcctccatcgactccaacatctcctccaagtccgccggcctgcccgtgcccaagctgcgcgagccctccaagaccgccctgggctcctccctgcccggcctggtgaaccaggacacccgcgagaagggcatctcctccgacaacgagtccgtggcctcctgcaactccgtgaaggtgaaccccgccgcccagcccgtgtcctcccccgcccagacctcccatcaccatcaccatcactag

SEQ ID NO: 415 - protein, 513 aa, Artificial sequence
  Synthetic
METDTLLLWVLLLWVPGSTGDTREPRGPTIKPCPPCKCPAPNLLGGPSVFIFPPKIKDVLMISLSPIVTCVVVDVSEDDPDVQISWFVNNVEVHTAQTQTHREDYNSTLRVVSALPIQHQDWMSGKEFKCKVNNKDLPAPIERTISKPKGSVRAPQVYVLPPPEEEMTKKQVTLTCMVTDFMPEDIYVEWTNNGKTELNYKNTEPVLDSDGSYFMYSKLRVEKKNWVERNSYSCSVVHEGLHNHHTTKSFSRTPGKAAADYKDDDDKVGITMPRTKPSAPAGALKTPGTGKTDDAKVSESTNDDPKASQVKRSPSDAGRSSGDESKKPLPSSSRTPTANANSFGFKKQSGSAAGLAMITASGVTVTSRSATLGKIPKSSALVSRSAGRKSSMDGAQNQDDGYLALSSRTNLQYRSLPRPSKSNSRNGAGNRSSTSSIDSNISSKSAGLPVPKLREPSKTALGSSLPGLVNQDTREKGISSDNESVASCNSVKVNPAAQPVSSPAQTSHHHHHH

SEQ ID NO: 416 - DNA, 1572 bp, Artificial sequence
  Synthetic
atggagacagacacactcctgctatgggtactgctgctctgggttccaggttccactggtgacacgcgtgagcccagagggcccacaatcaagccctgtcctccatgcaaatgcccagcacctaacctcttgggtggaccatccgtcttcatcttccctccaaagatcaaggatgtactcatgatctccctgagccccatagtcacatgtgtggtggtggatgtgagcgaggatgacccagatgtccagatcagctggtttgtgaacaacgtggaagtacacacagctcagacacaaacccatagagaggattacaacagtactctccgggtggtcagtgccctccccatccagcaccaggactggatgagtggcaaggagttcaaatgcaaggtcaacaacaaagacctcccagcgcccatcgagagaaccatctcaaaacccaaagggtcagtaagagctccacaggtatatgtcttgcctccaccagaagaagagatgactaagaaacaggtcactctgacctgcatggtcacagacttcatgcctgaagacatttacgtggagtggaccaacaacgggaaaacagagctaaactacaagaacactgaaccagtcctggactctgatggttcttacttcatgtacagcaagctgagagtggaaaagaagaactgggtggaaagaaatagctactcctgttcagtggtccacgagggtctgcacaatcaccacacgactaagagcttctcccggactccgggtaaagcggccgcagactacaaggacgacgacgacaaggtgggcatcaccatgccccgcaccaagccctccgcccccgccggcgccctgaagacccccggcaccggcaagaccgacgacgccaaggtgtccgagtccaaggacgtgcagctgaagaacatcaccgactacatgtacctgcccaaggcctcccaggtgaagcgctccccctccgacgccggccgctcctccggcgacgagtccaagaagcccctgccctcctcctcccgcacccccaccgccaacgccaactccttcggcttcaagaagcagtccggctccgccgccggcctggccatgatcaccgcctccggcgtgaccgtgacctcccgctccgccaccctgggcaagatccccaagtcctccgccctggtgtcccgctccgccggccgcaagtcctccatggacggcgcccagaaccaggacgacggctacctggccctgtcctcccgcaccaacctgcagtaccgctccctgccccgcccctccaagtccaactcccgcaacggcgccggcaaccgctcctccacctcctccatcgactccaacatctcctccaagtccgccggcctgcccgtgcccaagctgcgcgagccctccaagaccgccctgggctcctccctgcccggcctggtgaaccaggacacccgcgagaagggcatctcctccgacaacgagtccgtggcctcctgcaactccgtgaaggtgaaccccgccgcccagcccgtgtcctcccccgcccagacctcccatcaccatcaccatcactag

SEQ ID NO: 417 - protein, 523 aa, Artificial sequence
  Synthetic
METDTLLLWVLLLWVPGSTGDTREPRGPTIKPCPPCKCPAPNLLGGPSVFIFPPKIKDVLMISLSPIVTCVVVDVSEDDPDVQISWFVNNVEVHTAQTQTHREDYNSTLRVVSALPIQHQDWMSGKEFKCKVNNKDLPAPIERTISKPKGSVRAPQVYVLPPPEEEMTKKQVTLTCMVTDFMPEDIYVEWTNNGKTELNYKNTEPVLDSDGSYFMYSKLRVEKKNWVERNSYSCSVVHEGLHNHHTTKSFSRTPGKAAADYKDDDDKVGITMPRTKPSAPAGALKTPGTGKTDDAKVSESKDVQLKNITDYMYLPKASQVKRSPSDAGRSSGDESKKPLPSSSRTPTANANSFGFKKQSGSAAGLAMITASGVTVTSRSATLGKIPKSSALVSRSAGRKSSMDGAQNQDDGYLALSSRTNLQYRSLPRPSKSNSRNGAGNRSSTSSIDSNISSKSAGLPVPKLREPSKTALGSSLPGLVNQDTREKGISSDNESVASCNSVKVNPAAQPVSSPAQTSHHHHHH

SEQ ID NO: 418 - DNA, 1032 bp, Artificial sequence
  Synthetic
atggagacagacacactcctgctatgggtactgctgctctgggttccaggttccactggtgacacgcgtcatcaccatcaccatcactacccctccaagcccgacaaccccggcgaggacgcccccgccgaggacatggcccgctactactccgccctgcgccactacatcaacctgatcacccgccagcgctacgctgcccgcaagcgctcctcccccgagaccctgatctccgacctgctgatgcgcgagtccaccgagaacgtgccccgcacccgcctggaggaccccgccatgtgggactacaaggacgacgacgacaaggtcgacgagcccagagggcccacaatcaagccctgtcctccatgcaaatgcccagcacctaacctcttgggtggaccatccgtcttcatcttccctccaaagatcaaggatgtactcatgatctccctgagccccatagtcacatgtgtggtggtggatgtgagcgaggatgacccagatgtccagatcagctggtttgtgaacaacgtggaagtacacacagctcagacacaaacccatagagaggattacaacagtactctccgggtggtcagtgccctccccatccagcaccaggactggatgagtggcaaggagttcaaatgcaaggtcaacaacaaagacctcccagcgcccatcgagagaaccatctcaaaacccaaagggtcagtaagagctccacaggtatatgtcttgcctccaccagaagaagagatgactaagaaacaggtcactctgacctgcatggtcacagacttcatgcctgaagacatttacgtggagtggaccaacaacgggaaaacagagctaaactacaagaacactgaaccagtcctggactctgatggttcttacttcatgtacagcaagctgagagtggaaaagaagaactgggtggaaagaaatagctactcctgttcagtggtccacgagggtctgcacaatcaccacacgactaagagcttctcccggactccgggtaaatag

SEQ ID NO: 419 - protein, 343 aa, Artificial sequence
  Synthetic
METDTLLLWVLLLWVPGSTGDTRHHHHHHYPSKPDNPGEDAPAEDMARYYSALRHYINLITRQRYAARKRSSPETLISDLLMRESTENVPRTRLEDPAMWDYKDDDDKVDEPRGPTIKPCPPCKCPAPNLLGGPSVFIFPPKIKDVLMISLSPIVTCVVVDVSEDDPDVQISWFVNNVEVHTAQTQTHREDYNSTLRVVSALPIQHQDWMSGKEFKCKVNNKDLPAPIERTISKPKGSVRAPQVYVLPPPEEEMTKKQVTLTCMVTDFMPEDIYVEWTNNGKTELNYKNTEPVLDSDGSYFMYSKLRVEKKNWVERNSYSCSVVHEGLHNHHTTKSFSRTPGK

SEQ ID NO: 420 - DNA, 1026 bp, Artificial sequence
  Synthetic
atggagacagacacactcctgctatgggtactgctgctctgggttccaggttccactggtgacacgcgtcatcaccatcaccatcactacccctccaagcccgacaacccccccgacgccgagggcgccgaggacatggcccgctactactccgccctgcgccactacatcaacctgatcacccgccagcgctacgctgcccgctcctcccccgagaccctgatctccgacctgctgatgcgcgagtccaccgagaacgtgccccgcacccgcctggaggaccccgccatgtgggactacaaggacgacgacgacaaggtcgacgagcccagagggcccacaatcaagccctgtcctccatgcaaatgcccagcacctaacctcttgggtggaccatccgtcttcatcttccctccaaagatcaaggatgtactcatgatctccctgagccccatagtcacatgtgtggtggtggatgtgagcgaggatgacccagatgtccagatcagctggtttgtgaacaacgtggaagtacacacagctcagacacaaacccatagagaggattacaacagtactctccgggtggtcagtgccctccccatccagcaccaggactggatgagtggcaaggagttcaaatgcaaggtcaacaacaaagacctcccagcgcccatcgagagaaccatctcaaaacccaaagggtcagtaagagctccacaggtatatgtcttgcctccaccagaagaagagatgactaagaaacaggtcactctgacctgcatggtcacagacttcatgcctgaagacatttacgtggagtggaccaacaacgggaaaacagagctaaactacaagaacactgaaccagtcctggactctgatggttcttacttcatgtacagcaagctgagagtggaaaagaagaactgggtggaaagaaatagctactcctgttcagtggtccacgagggtctgcacaatcaccacacgactaagagcttctcccggactccgggtaaatag

SEQ ID NO: 421 - protein, 341 aa, Artificial sequence
  Synthetic
METDTLLLWVLLLWVPGSTGDTRHHHHHHYPSKPDNPPDAEGAEDMARYYSALRHYINLITRQRYAARSSPETLISDLLMRESTENVPRTRLEDPAMWDYKDDDDKVDEPRGPTIKPCPPCKCPAPNLLGGPSVFIFPPKIKDVLMISLSPIVTCVVVDVSEDDPDVQISWFVNNVEVHTAQTQTHREDYNSTLRVVSALPIQHQDWMSGKEFKCKVNNKDLPAPIERTISKPKGSVRAPQVYVLPPPEEEMTKKQVTLTCMVTDFMPEDIYVEWTNNGKTELNYKNTEPVLDSDGSYFMYSKLRVEKKNWVERNSYSCSVVHEGLHNHHTTKSFSRTPGK

SEQ ID NO: 422 - DNA, 1032 bp, Artificial sequence
  Synthetic
atggagacagacacactcctgctatgggtactgctgctctgggttccaggttccactggtgacacgcgtcatcaccatcaccatcactacccctccaagcccgacaaccccggcgaggacgcccccgccgaggacatggcccgctactactccgccctgcgccactacatcaacctgatcacccgccagcgctacgctgcccgcaagcgctcctcccccgagaccctgatctccgacctgctgatgcgcaacacctccgaggaggtgccccgcacccgcctggaggaccccgccatgtgggactacaaggacgacgacgacaaggtcgacgagcccagagggcccacaatcaagccctgtcctccatgcaaatgcccagcacctaacctcttgggtggaccatccgtcttcatcttccctccaaagatcaaggatgtactcatgatctccctgagccccatagtcacatgtgtggtggtggatgtgagcgaggatgacccagatgtccagatcagctggtttgtgaacaacgtggaagtacacacagctcagacacaaacccatagagaggattacaacagtactctccgggtggtcagtgccctccccatccagcaccaggactggatgagtggcaaggagttcaaatgcaaggtcaacaacaaagacctcccagcgcccatcgagagaaccatctcaaaacccaaagggtcagtaagagctccacaggtatatgtcttgcctccaccagaagaagagatgactaagaaacaggtcactctgacctgcatggtcacagacttcatgcctgaagacatttacgtggagtggaccaacaacgggaaaacagagctaaactacaagaacactgaaccagtcctggactctgatggttcttacttcatgtacagcaagctgagagtggaaaagaagaactgggtggaaagaaatagctactcctgttcagtggtccacgagggtctgcacaatcaccacacgactaagagcttctcccggactccgggtaaatag

SEQ ID NO: 423 - protein, 343 aa, Artificial sequence
  Synthetic
METDTLLLWVLLLWVPGSTGDTRHHHHHHYPSKPDNPGEDAPAEDMARYYSALRHYINLITRQRYAARKRSSPETLISDLLMRNTSEEVPRTRLEDPAMWDYKDDDDKVDEPRGPTIKPCPPCKCPAPNLLGGPSVFIFPPKIKDVLMISLSPIVTCVVVDVSEDDPDVQISWFVNNVEVHTAQTQTHREDYNSTLRVVSALPIQHQDWMSGKEFKCKVNNKDLPAPIERTISKPKGSVRAPQVYVLPPPEEEMTKKQVTLTCMVTDFMPEDIYVEWTNNGKTELNYKNTEPVLDSDGSYFMYSKLRVEKKNWVERNSYSCSVVHEGLHNHHTTKSFSRTPGK

SEQ ID NO: 424 - DNA, 1032 bp, Artificial sequence
  Synthetic
atggagacagacacactcctgctatgggtactgctgctctgggttccaggttccactggtgacacgcgtcatcaccatcaccatcactacccctccaagcccgacaacccccccgacgccgagggcgccgaggacatggcccgctactactccgccctgcgccactacatcaacctgatcacccgccagcgctacgctgcccgcaagcgctcctcccccgagaccctgatctccgacctgctgatgcgctccaccaacgacgacgtgccccgcacccgcctggaggaccccgccatgtgggactacaaggacgacgacgacaaggtcgacgagcccagagggcccacaatcaagccctgtcctccatgcaaatgcccagcacctaacctcttgggtggaccatccgtcttcatcttccctccaaagatcaaggatgtactcatgatctccctgagccccatagtcacatgtgtggtggtggatgtgagcgaggatgacccagatgtccagatcagctggtttgtgaacaacgtggaagtacacacagctcagacacaaacccatagagaggattacaacagtactctccgggtggtcagtgccctccccatccagcaccaggactggatgagtggcaaggagttcaaatgcaaggtcaacaacaaagacctcccagcgcccatcgagagaaccatctcaaaacccaaagggtcagtaagagctccacaggtatatgtcttgcctccaccagaagaagagatgactaagaaacaggtcactctgacctgcatggtcacagacttcatgcctgaagacatttacgtggagtggaccaacaacgggaaaacagagctaaactacaagaacactgaaccagtcctggactctgatggttcttacttcatgtacagcaagctgagagtggaaaagaagaactgggtggaaagaaatagctactcctgttcagtggtccacgagggtctgcacaatcaccacacgactaagagcttctcccggactccgggtaaatag

SEQ ID NO: 425 - protein, 343 aa, Artificial sequence
  Synthetic
METDTLLLWVLLLWVPGSTGDTRHHHHHHYPSKPDNPPDAEGAEDMARYYSALRHYINLITRQRYAARKRSSPETLISDLLMRSTNDDVPRTRLEDPAMWDYKDDDDKVDEPRGPTIKPCPPCKCPAPNLLGGPSVFIFPPKIKDVLMISLSPIVTCVVVDVSEDDPDVQISWFVNNVEVHTAQTQTHREDYNSTLRVVSALPIQHQDWMSGKEFKCKVNNKDLPAPIERTISKPKGSVRAPQVYVLPPPEEEMTKKQVTLTCMVTDFMPEDIYVEWTNNGKTELNYKNTEPVLDSDGSYFMYSKLRVEKKNWVERNSYSCSVVHEGLHNHHTTKSFSRTPGK

SEQ ID NO: 426 - DNA, 1062 bp, Artificial sequence
  Synthetic
atggagacagacacactcctgctatgggtactgctgctctgggttccaggttccactggtgacacgcgtcatcaccatcaccatcactacccctccaagcccgacaacccccccgacgccgagggcgccgaggacatggcccgctactactccgccctgcgccactacatcaacctgatcacccgccagcgctacgctgcccgcaagcgctcctcccccgagaccctgatctccgacctgctgatgcgctccaaggacgtgcagctgaagaacatcaccgactacatgtacctggtgccccgcacccgcctggaggaccccgccatgtgggactacaaggacgacgacgacaaggtcgacgagcccagagggcccacaatcaagccctgtcctccatgcaaatgcccagcacctaacctcttgggtggaccatccgtcttcatcttccctccaaagatcaaggatgtactcatgatctccctgagccccatagtcacatgtgtggtggtggatgtgagcgaggatgacccagatgtccagatcagctggtttgtgaacaacgtggaagtacacacagctcagacacaaacccatagagaggattacaacagtactctccgggtggtcagtgccctccccatccagcaccaggactggatgagtggcaaggagttcaaatgcaaggtcaacaacaaagacctcccagcgcccatcgagagaaccatctcaaaacccaaagggtcagtaagagctccacaggtatatgtcttgcctccaccagaagaagagatgactaagaaacaggtcactctgacctgcatggtcacagacttcatgcctgaagacatttacgtggagtggaccaacaacgggaaaacagagctaaactacaagaacactgaaccagtcctggactctgatggttcttacttcatgtacagcaagctgagagtggaaaagaagaactgggtggaaagaaatagctactcctgttcagtggtccacgagggtctgcacaatcaccacacgactaagagcttctcccggactccgggtaaatag

SEQ ID NO: 427 - protein, 353 aa, Artificial sequence
  Synthetic
METDTLLLWVLLLWVPGSTGDTRHHHHHHYPSKPDNPPDAEGAEDMARYYSALRHYINLITRQRYAARKRSSPETLISDLLMRSKDVQLKNITDYMYLVPRTRLEDPAMWDYKDDDDKVDEPRGPTIKPCPPCKCPAPNLLGGPSVFIFPPKIKDVLMISLSPIVTCVVVDVSEDDPDVQISWFVNNVEVHTAQTQTHREDYNSTLRVVSALPIQHQDWMSGKEFKCKVNNKDLPAPIERTISKPKGSVRAPQVYVLPPPEEEMTKKQVTLTCMVTDFMPEDIYVEWTNNGKTELNYKNTEPVLDSDGSYFMYSKLRVEKKNWVERNSYSCSVVHEGLHNHHTTKSFSRTPGK

SEQ ID NO: 428 - DNA, 1035 bp, Artificial sequence
  Synthetic
atggagacagacacactcctgctatgggtactgctgctctgggttccaggttccactggtgacacgcgtgagcccagagggcccacaatcaagccctgtcctccatgcaaatgcccagcacctaacctcttgggtggaccatccgtcttcatcttccctccaaagatcaaggatgtactcatgatctccctgagccccatagtcacatgtgtggtggtggatgtgagcgaggatgacccagatgtccagatcagctggtttgtgaacaacgtggaagtacacacagctcagacacaaacccatagagaggattacaacagtactctccgggtggtcagtgccctccccatccagcaccaggactggatgagtggcaaggagttcaaatgcaaggtcaacaacaaagacctcccagcgcccatcgagagaaccatctcaaaacccaaagggtcagtaagagctccacaggtatatgtcttgcctccaccagaagaagagatgactaagaaacaggtcactctgacctgcatggtcacagacttcatgcctgaagacatttacgtggagtggaccaacaacgggaaaacagagctaaactacaagaacactgaaccagtcctggactctgatggttcttacttcatgtacagcaagctgagagtggaaaagaagaactgggtggaaagaaatagctactcctgttcagtggtccacgagggtctgcacaatcaccacacgactaagagcttctcccggactccgggtaaagcggccgcagactacaaggacgacgacgacaagtacccctccaagcccgacaaccccggcgaggacgcccccgccgaggacatggcccgctactactccgccctgcgccactacatcaacctgatcacccgccagcgctacgctgcccgcaagcgctcctcccccgagaccctgatctccgacctgctgatgcgcgagtccaccgagaacgtgccccgcacccgcctggaggaccccgccatgtggcatcaccatcaccatcactag

SEQ ID NO: 429 - protein, 344 aa, Artificial sequence
  Synthetic
METDTLLLWVLLLWVPGSTGDTREPRGPTIKPCPPCKCPAPNLLGGPSVFIFPPKIKDVLMISLSPIVTCVVVDVSEDDPDVQISWFVNNVEVHTAQTQTHREDYNSTLRVVSALPIQHQDWMSGKEFKCKVNNKDLPAPIERTISKPKGSVRAPQVYVLPPPEEEMTKKQVTLTCMVTDFMPEDIYVEWTNNGKTELNYKNTEPVLDSDGSYFMYSKLRVEKKNWVERNSYSCSVVHEGLHNHHTTKSFSRTPGKAAADYKDDDDKYPSKPDNPGEDAPAEDMARYYSALRHYINLITRQRYAARKRSSPETLISDLLMRESTENVPRTRLEDPAMWHHHHHH

SEQ ID NO: 430 - DNA, 1029 bp, Artificial sequence
  Synthetic
atggagacagacacactcctgctatgggtactgctgctctgggttccaggttccactggtgacacgcgtgagcccagagggcccacaatcaagccctgtcctccatgcaaatgcccagcacctaacctcttgggtggaccatccgtcttcatcttccctccaaagatcaaggatgtactcatgatctccctgagccccatagtcacatgtgtggtggtggatgtgagcgaggatgacccagatgtccagatcagctggtttgtgaacaacgtggaagtacacacagctcagacacaaacccatagagaggattacaacagtactctccgggtggtcagtgccctccccatccagcaccaggactggatgagtggcaaggagttcaaatgcaaggtcaacaacaaagacctcccagcgcccatcgagagaaccatctcaaaacccaaagggtcagtaagagctccacaggtatatgtcttgcctccaccagaagaagagatgactaagaaacaggtcactctgacctgcatggtcacagacttcatgcctgaagacatttacgtggagtggaccaacaacgggaaaacagagctaaactacaagaacactgaaccagtcctggactctgatggttcttacttcatgtacagcaagctgagagtggaaaagaagaactgggtggaaagaaatagctactcctgttcagtggtccacgagggtctgcacaatcaccacacgactaagagcttctcccggactccgggtaaagcggccgcagactacaaggacgacgacgacaagtacccctccaagcccgacaacccccccgacgccgagggcgccgaggacatggcccgctactactccgccctgcgccactacatcaacctgatcacccgccagcgctacgctgcccgctcctcccccgagaccctgatctccgacctgctgatgcgcgagtccaccgagaacgtgccccgcacccgcctggaggaccccgccatgtggcatcaccatcaccatcactag

SEQ ID NO: 431 - protein, 342 aa, Artificial sequence
  Synthetic
METDTLLLWVLLLWVPGSTGDTREPRGPTIKPCPPCKCPAPNLLGGPSVFIFPPKIKDVLMISLSPIVTCVVVDVSEDDPDVQISWFVNNVEVHTAQTQTHREDYNSTLRVVSALPIQHQDWMSGKEFKCKVNNKDLPAPIERTISKPKGSVRAPQVYVLPPPEEEMTKKQVTLTCMVTDFMPEDIYVEWTNNGKTELNYKNTEPVLDSDGSYFMYSKLRVEKKNWVERNSYSCSVVHEGLHNHHTTKSFSRTPGKAAADYKDDDDKYPSKPDNPPDAEGAEDMARYYSALRHYINLITRQRYAARSSPETLISDLLMRESTENVPRTRLEDPAMWHHHHHH

SEQ ID NO: 432 - DNA, 1035 bp, Artificial sequence
  Synthetic
atggagacagacacactcctgctatgggtactgctgctctgggttccaggttccactggtgacacgcgtgagcccagagggcccacaatcaagccctgtcctccatgcaaatgcccagcacctaacctcttgggtggaccatccgtcttcatcttccctccaaagatcaaggatgtactcatgatctccctgagccccatagtcacatgtgtggtggtggatgtgagcgaggatgacccagatgtccagatcagctggtttgtgaacaacgtggaagtacacacagctcagacacaaacccatagagaggattacaacagtactctccgggtggtcagtgccctccccatccagcaccaggactggatgagtggcaaggagttcaaatgcaaggtcaacaacaaagacctcccagcgcccatcgagagaaccatctcaaaacccaaagggtcagtaagagctccacaggtatatgtcttgcctccaccagaagaagagatgactaagaaacaggtcactctgacctgcatggtcacagacttcatgcctgaagacatttacgtggagtggaccaacaacgggaaaacagagctaaactacaagaacactgaaccagtcctggactctgatggttcttacttcatgtacagcaagctgagagtggaaaagaagaactgggtggaaagaaatagctactcctgttcagtggtccacgagggtctgcacaatcaccacacgactaagagcttctcccggactccgggtaaagcggccgcagactacaaggacgacgacgacaagtacccctccaagcccgacaaccccggcgaggacgcccccgccgaggacatggcccgctactactccgccctgcgccactacatcaacctgatcacccgccagcgctacgctgcccgcaagcgctcctcccccgagaccctgatctccgacctgctgatgcgcaacacctccgaggaggtgccccgcacccgcctggaggaccccgccatgtggcatcaccatcaccatcactag

SEQ ID NO: 433 - protein, 344 aa, Artificial sequence
  Synthetic
METDTLLLWVLLLWVPGSTGDTREPRGPTIKPCPPCKCPAPNLLGGPSVFIFPPKIKDVLMISLSPIVTCVVVDVSEDDPDVQISWFVNNVEVHTAQTQTHREDYNSTLRVVSALPIQHQDWMSGKEFKCKVNNKDLPAPIERTISKPKGSVRAPQVYVLPPPEEEMTKKQVTLTCMVTDFMPEDIYVEWTNNGKTELNYKNTEPVLDSDGSYFMYSKLRVEKKNWVERNSYSCSVVHEGLHNHHTTKSFSRTPGKAAADYKDDDDKYPSKPDNPGEDAPAEDMARYYSALRHYINLITRQRYAARKRSSPETLISDLLMRNTSEEVPRTRLEDPAMWHHHHHH

SEQ ID NO: 434 - DNA, 1035 bp, Artificial sequence
  Synthetic
atggagacagacacactcctgctatgggtactgctgctctgggttccaggttccactggtgacacgcgtgagcccagagggcccacaatcaagccctgtcctccatgcaaatgcccagcacctaacctcttgggtggaccatccgtcttcatcttccctccaaagatcaaggatgtactcatgatctccctgagccccatagtcacatgtgtggtggtggatgtgagcgaggatgacccagatgtccagatcagctggtttgtgaacaacgtggaagtacacacagctcagacacaaacccatagagaggattacaacagtactctccgggtggtcagtgccctccccatccagcaccaggactggatgagtggcaaggagttcaaatgcaaggtcaacaacaaagacctcccagcgcccatcgagagaaccatctcaaaacccaaagggtcagtaagagctccacaggtatatgtcttgcctccaccagaagaagagatgactaagaaacaggtcactctgacctgcatggtcacagacttcatgcctgaagacatttacgtggagtggaccaacaacgggaaaacagagctaaactacaagaacactgaaccagtcctggactctgatggttcttacttcatgtacagcaagctgagagtggaaaagaagaactgggtggaaagaaatagctactcctgttcagtggtccacgagggtctgcacaatcaccacacgactaagagcttctcccggactccgggtaaagcggccgcagactacaaggacgacgacgacaagtacccctccaagcccgacaacccccccgacgccgagggcgccgaggacatggcccgctactactccgccctgcgccactacatcaacctgatcacccgccagcgctacgctgcccgcaagcgctcctcccccgagaccctgatctccgacctgctgatgcgctccaccaacgacgacgtgccccgcacccgcctggaggaccccgccatgtggcatcaccatcaccatcactag

SEQ ID NO: 435 - protein, 344 aa, Artificial sequence
  Synthetic
METDTLLLWVLLLWVPGSTGDTREPRGPTIKPCPPCKCPAPNLLGGPSVFIFPPKIKDVLMISLSPIVTCVVVDVSEDDPDVQISWFVNNVEVHTAQTQTHREDYNSTLRVVSALPIQHQDWMSGKEFKCKVNNKDLPAPIERTISKPKGSVRAPQVYVLPPPEEEMTKKQVTLTCMVTDFMPEDIYVEWTNNGKTELNYKNTEPVLDSDGSYFMYSKLRVEKKNWVERNSYSCSVVHEGLHNHHTTKSFSRTPGKAAADYKDDDDKYPSKPDNPPDAEGAEDMARYYSALRHYINLITRQRYAARKRSSPETLISDLLMRSTNDDVPRTRLEDPAMWHHHHHH

SEQ ID NO: 436 - DNA, 1065 bp, Artificial sequence
  Synthetic
atggagacagacacactcctgctatgggtactgctgctctgggttccaggttccactggtgacacgcgtgagcccagagggcccacaatcaagccctgtcctccatgcaaatgcccagcacctaacctcttgggtggaccatccgtcttcatcttccctccaaagatcaaggatgtactcatgatctccctgagccccatagtcacatgtgtggtggtggatgtgagcgaggatgacccagatgtccagatcagctggtttgtgaacaacgtggaagtacacacagctcagacacaaacccatagagaggattacaacagtactctccgggtggtcagtgccctccccatccagcaccaggactggatgagtggcaaggagttcaaatgcaaggtcaacaacaaagacctcccagcgcccatcgagagaaccatctcaaaacccaaagggtcagtaagagctccacaggtatatgtcttgcctccaccagaagaagagatgactaagaaacaggtcactctgacctgcatggtcacagacttcatgcctgaagacatttacgtggagtggaccaacaacgggaaaacagagctaaactacaagaacactgaaccagtcctggactctgatggttcttacttcatgtacagcaagctgagagtggaaaagaagaactgggtggaaagaaatagctactcctgttcagtggtccacgagggtctgcacaatcaccacacgactaagagcttctcccggactccgggtaaagcggccgcagactacaaggacgacgacgacaagtacccctccaagcccgacaacccccccgacgccgagggcgccgaggacatggcccgctactactccgccctgcgccactacatcaacctgatcacccgccagcgctacgctgcccgcaagcgctcctcccccgagaccctgatctccgacctgctgatgcgctccaaggacgtgcagctgaagaacatcaccgactacatgtacctggtgccccgcacccgcctggaggaccccgccatgtggcatcaccatcaccatcactag

SEQ ID NO: 437 - protein, 354 aa, Artificial sequence
  Synthetic
METDTLLLWVLLLWVPGSTGDTREPRGPTIKPCPPCKCPAPNLLGGPSVFIFPPKIKDVLMISLSPIVTCVVVDVSEDDPDVQISWFVNNVEVHTAQTQTHREDYNSTLRVVSALPIQHQDWMSGKEFKCKVNNKDLPAPIERTISKPKGSVRAPQVYVLPPPEEEMTKKQVTLTCMVTDFMPEDIYVEWTNNGKTELNYKNTEPVLDSDGSYFMYSKLRVEKKNWVERNSYSCSVVHEGLHNHHTTKSFSRTPGKAAADYKDDDDKYPSKPDNPPDAEGAEDMARYYSALRHYINLITRQRYAARKRSSPETLISDLLMRSKDVQLKNITDYMYLVPRTRLEDPAMWHHHHHH

SEQ ID NO: 438 - DNA, 1881 bp, Zika virus
atggagacagacacactcctgctatgggtactgctgctctgggttccaggttccactggtgacacgcgtgccgacgtgggctgctccgtggacttctccaagaaggagacccgctgcggcaccggcgtgttcgtgtacaacgacgtggaggcctggcgcgaccgctacaagtaccaccccgactccccccgccgcctggccgccgccgtgaagcaggcctgggaggacggcatctgcggcatctcctccgtgtcccgcatggagaacatcatgtggcgctccgtggagggcgagctgaacgccatcctggaggagaacggcgtgcagctgaccgtggtggtgggctccgtgaagaaccccatgtggcgcggcccccagcgcctgcccgtgcccgtgaacgagctgccccacggctggaaggcctggggcaagtcccacttcgtgcgcgccgccaagaccaacaactccttcgtggtggacggcgacaccctgaaggagtgccccctgaagcaccgcgcctggaactccttcctggtggaggaccacggcttcggcgtgttccacacctccgtgtggctgaaggtgcgcgaggactactccctggagtgcgaccccgccgtgatcggcaccgccgtgaagggcaaggaggccgtgcactccgacctgggctactggatcgagtccgagaagaacgacacctggcgcctgaagcgcgcccacctgatcgagatgaagacctgcgagtggcccaagtcccacaccctgtggaccgacggcatcgaggagtccgacctgatcatccccaagtccctggccggccccctgtcccaccacaacacccgcgagggctaccgcacccagatgaagggcccctggcactccgaggagctggagatccgcttcgaggagtgccccggcaccaaggtgcacgtggaggagacctgcggcacccgcggcccctccctgcgctccaccaccgcctccggccgcgtgatcgaggagtggtgctgccgcgagtgcaccatgccccccctgtccttccgcgccaaggacggctgctggtacggcatggagatccgcccccgcaaggagcccgagtccaacctggtgcgctccatggtgaccgccggctccaccgaccacatggaccacgactacaaggacgacgacgacaaggtcgacgagcccaaatcttgtgacaaaactcacacatgcccaccgtgcccagcacctgaactcctggggggaccgtcagtcttcctcttccccccaaaacccaaggacaccctcatgatctcccggacccctgaggtcacatgcgtggtggtggacgtgagccacgaagaccctgaggtcaagttcaactggtacgtggacggcgtggaggtgcataatgccaagacaaagccgcgggaggagcagtacaacagcacgtaccgtgtggtcagcgtcctcaccgtcctgcaccaggactggctgaatggcaaggagtacaagtgcaaggtctccaacaaagccctcccagcccccatcgagaaaaccatctccaaagccaaagggcagccccgagaaccacaggtgtacaccctgcccccatcccgggaggagatgaccaagaaccaggtcagcctgacctgcctggtcaaaggcttctatcccagcgacatcgccgtggagtgggagagcaatgggcagccggagaacaactacaagaccacgcctcccgtgctggactccgacggctccttcttcctctatagcaagctcaccgtggacaagagcaggtggcagcaggggaacgtcttctcatgctccgtgatgcatgaggctctgcacaaccactacacgcagaagagcctctccctgtctccgggtaaatga

SEQ ID NO: 439 - protein, 626 aa, Zika virus
METDTLLLWVLLLWVPGSTGDTRADVGCSVDFSKKETRCGTGVFVYNDVEAWRDRYKYHPDSPRRLAAAVKQAWEDGICGISSVSRMENIMWRSVEGELNAILEENGVQLTVVVGSVKNPMWRGPQRLPVPVNELPHGWKAWGKSHFVRAAKTNNSFVVDGDTLKECPLKHRAWNSFLVEDHGFGVFHTSVWLKVREDYSLECDPAVIGTAVKGKEAVHSDLGYWIESEKNDTWRLKRAHLIEMKTCEWPKSHTLWTDGIEESDLIIPKSLAGPLSHHNTREGYRTQMKGPWHSEELEIRFEECPGTKVHVEETCGTRGPSLRSTTASGRVIEEWCCRECTMPPLSFRAKDGCWYGMEIRPRKEPESNLVRSMVTAGSTDHMDHDYKDDDDKVDEPKSCDKTHTCPPCPAPELLGGPSVFLFPPKPKDTLMISRTPEVTCVVVDVSHEDPEVKFNWYVDGVEVHNAKTKPREEQYNSTYRVVSVLTVLHQDWLNGKEYKCKVSNKALPAPIEKTISKAKGQPREPQVYTLPPSREEMTKNQVSLTCLVKGFYPSDIAVEWESNGQPENNYKTTPPVLDSDGSFFLYSKLTVDKSRWQQGNVFSCSVMHEALHNHYTQKSLSLSPGK

SEQ ID NO: 440 - DNA, 1881 bp, Zika virus
atggagacagacacactcctgctatgggtactgctgctctgggttccaggttccactggtgacacgcgtgccgacgtgggctgctccgtggacttctccaagaaggagacccgctgcggcaccggcgtgttcgtgtacaacgacgtggaggcctggcgcgaccgctacaagtaccaccccgactccccccgccgcctggccgccgccgtgaagcaggcctgggaggacggcatctgcggcatctcctccgtgtcccgcatggagaacatcatgtggcgctccgtggagggcgagctgaacgccatcctggaggagaacggcgtgcagctgaccgtggtggtgggctccgtgaagaaccccatgtggcgcggcccccagcgcctgcccgtgcccgtgaacgagctgccccacggctggaaggcctggggcaagtcccacttcgtgcgcgccgccaagaccaacaactccttcgtggtggacggcgacaccctgaaggagtgccccctgaagcaccgcgcctggaactccttcctggtggaggaccacggcttcggcgtgttccacacctccgtgtggctgaaggtgcgcgaggactactccctggagtgcgaccccgccgtgatcggcaccgccgtgaagggcaaggaggccgtgcactccgacctgggctactggatcgagtccgagaagaacgacacctggcgcctgaagcgcgcccacctgatcgagatgaagacctgcgagtggcccaagtcccacaccctgtggaccgacggcatcgaggagtccgacctgatcatccccaagtccctggccggccccctgtcccaccacaacacccgcgagggctaccgcacccagatgaagggcccctggcactccgaggagctggagatccgcttcgaggagtgccccggcaccaaggtgcacgtggaggagacctgcggcacccgcggcccctccctgcgcatgaccaccgtgatgggccgcgtgatcgaggagtggtgctgccgcgagtgcaccatgccccccctgtccttccgcgccaaggacggctgctggtacggcatggagatccgcccccgcaaggagcccgagtccaacctggtgcgctccatggtgaccgccggctccaccgaccacatggaccacgactacaaggacgacgacgacaaggtcgacgagcccaaatcttgtgacaaaactcacacatgcccaccgtgcccagcacctgaactcctggggggaccgtcagtcttcctcttccccccaaaacccaaggacaccctcatgatctcccggacccctgaggtcacatgcgtggtggtggacgtgagccacgaagaccctgaggtcaagttcaactggtacgtggacggcgtggaggtgcataatgccaagacaaagccgcgggaggagcagtacaacagcacgtaccgtgtggtcagcgtcctcaccgtcctgcaccaggactggctgaatggcaaggagtacaagtgcaaggtctccaacaaagccctcccagcccccatcgagaaaaccatctccaaagccaaagggcagccccgagaaccacaggtgtacaccctgcccccatcccgggaggagatgaccaagaaccaggtcagcctgacctgcctggtcaaaggcttctatcccagcgacatcgccgtggagtgggagagcaatgggcagccggagaacaactacaagaccacgcctcccgtgctggactccgacggctccttcttcctctatagcaagctcaccgtggacaagagcaggtggcagcaggggaacgtcttctcatgctccgtgatgcatgaggctctgcacaaccactacacgcagaagagcctctccctgtctccgggtaaatga

SEQ ID NO: 441 - protein, 626 aa, Zika virus
METDTLLLWVLLLWVPGSTGDTRADVGCSVDFSKKETRCGTGVFVYNDVEAWRDRYKYHPDSPRRLAAAVKQAWEDGICGISSVSRMENIMWRSVEGELNAILEENGVQLTVVVGSVKNPMWRGPQRLPVPVNELPHGWKAWGKSHFVRAAKTNNSFVVDGDTLKECPLKHRAWNSFLVEDHGFGVFHTSVWLKVREDYSLECDPAVIGTAVKGKEAVHSDLGYWIESEKNDTWRLKRAHLIEMKTCEWPKSHTLWTDGIEESDLIIPKSLAGPLSHHNTREGYRTQMKGPWHSEELEIRFEECPGTKVHVEETCGTRGPSLRMTTVMGRVIEEWCCRECTMPPLSFRAKDGCWYGMEIRPRKEPESNLVRSMVTAGSTDHMDHDYKDDDDKVDEPKSCDKTHTCPPCPAPELLGGPSVFLFPPKPKDTLMISRTPEVTCVVVDVSHEDPEVKFNWYVDGVEVHNAKTKPREEQYNSTYRVVSVLTVLHQDWLNGKEYKCKVSNKALPAPIEKTISKAKGQPREPQVYTLPPSREEMTKNQVSLTCLVKGFYPSDIAVEWESNGQPENNYKTTPPVLDSDGSFFLYSKLTVDKSRWQQGNVFSCSVMHEALHNHYTQKSLSLSPGK

SEQ ID NO: 442 - DNA, 1368 bp, Zika virus
atggagacagacacactcctgctatgggtactgctgctctgggttccaggttccactggtgacacgcgtgtgcgcgaggactactccctggagtgcgaccccgccgtgatcggcaccgccgtgaagggcaaggaggccgtgcactccgacctgggctactggatcgagtccgagaagaacgacacctggcgcctgaagcgcgcccacctgatcgagatgaagacctgcgagtggcccaagtcccacaccctgtggaccgacggcatcgaggagtccgacctgatcatccccaagtccctggccggccccctgtcccaccacaacacccgcgagggctaccgcacccagatgaagggcccctggcactccgaggagctggagatccgcttcgaggagtgccccggcaccaaggtgcacgtggaggagacctgcggcacccgcggcccctccctgcgctccaccaccgcctccggccgcgtgatcgaggagtggtgctgccgcgagtgcaccatgccccccctgtccttccgcgccaaggacggctgctggtacggcatggagatccgcccccgcaaggagcccgagtccaacctggtgcgctccatggtgaccgccggctccaccgaccacatggaccacgactacaaggacgacgacgacaaggtcgacgagcccaaatcttgtgacaaaactcacacatgcccaccgtgcccagcacctgaactcctggggggaccgtcagtcttcctcttccccccaaaacccaaggacaccctcatgatctcccggacccctgaggtcacatgcgtggtggtggacgtgagccacgaagaccctgaggtcaagttcaactggtacgtggacggcgtggaggtgcataatgccaagacaaagccgcgggaggagcagtacaacagcacgtaccgtgtggtcagcgtcctcaccgtcctgcaccaggactggctgaatggcaaggagtacaagtgcaaggtctccaacaaagccctcccagcccccatcgagaaaaccatctccaaagccaaagggcagccccgagaaccacaggtgtacaccctgcccccatcccgggaggagatgaccaagaaccaggtcagcctgacctgcctggtcaaaggcttctatcccagcgacatcgccgtggagtgggagagcaatgggcagccggagaacaactacaagaccacgcctcccgtgctggactccgacggctccttcttcctctatagcaagctcaccgtggacaagagcaggtggcagcaggggaacgtcttctcatgctccgtgatgcatgaggctctgcacaaccactacacgcagaagagcctctccctgtctccgggtaaatga

SEQ ID NO: 443 - protein, 455 aa, Zika virus
METDTLLLWVLLLWVPGSTGDTRVREDYSLECDPAVIGTAVKGKEAVHSDLGYWIESEKNDTWRLKRAHLIEMKTCEWPKSHTLWTDGIEESDLIIPKSLAGPLSHHNTREGYRTQMKGPWHSEELEIRFEECPGTKVHVEETCGTRGPSLRSTTASGRVIEEWCCRECTMPPLSFRAKDGCWYGMEIRPRKEPESNLVRSMVTAGSTDHMDHDYKDDDDKVDEPKSCDKTHTCPPCPAPELLGGPSVFLFPPKPKDTLMISRTPEVTCVVVDVSHEDPEVKFNWYVDGVEVHNAKTKPREEQYNSTYRVVSVLTVLHQDWLNGKEYKCKVSNKALPAPIEKTISKAKGQPREPQVYTLPPSREEMTKNQVSLTCLVKGFYPSDIAVEWESNGQPENNYKTTPPVLDSDGSFFLYSKLTVDKSRWQQGNVFSCSVMHEALHNHYTQKSLSLSPGK

SEQ ID NO: 444 - DNA, 1368 bp, Zika virus
atggagacagacacactcctgctatgggtactgctgctctgggttccaggttccactggtgacacgcgtgtgcgcgaggactactccctggagtgcgaccccgccgtgatcggcaccgccgtgaagggcaaggaggccgtgcactccgacctgggctactggatcgagtccgagaagaacgacacctggcgcctgaagcgcgcccacctgatcgagatgaagacctgcgagtggcccaagtcccacaccctgtggaccgacggcatcgaggagtccgacctgatcatccccaagtccctggccggccccctgtcccaccacaacacccgcgagggctaccgcacccagatgaagggcccctggcactccgaggagctggagatccgcttcgaggagtgccccggcaccaaggtgcacgtggaggagacctgcggcacccgcggcccctccctgcgcatgaccaccgtgatgggccgcgtgatcgaggagtggtgctgccgcgagtgcaccatgccccccctgtccttccgcgccaaggacggctgctggtacggcatggagatccgcccccgcaaggagcccgagtccaacctggtgcgctccatggtgaccgccggctccaccgaccacatggaccacgactacaaggacgacgacgacaaggtcgacgagcccaaatcttgtgacaaaactcacacatgcccaccgtgcccagcacctgaactcctggggggaccgtcagtcttcctcttccccccaaaacccaaggacaccctcatgatctcccggacccctgaggtcacatgcgtggtggtggacgtgagccacgaagaccctgaggtcaagttcaactggtacgtggacggcgtggaggtgcataatgccaagacaaagccgcgggaggagcagtacaacagcacgtaccgtgtggtcagcgtcctcaccgtcctgcaccaggactggctgaatggcaaggagtacaagtgcaaggtctccaacaaagccctcccagcccccatcgagaaaaccatctccaaagccaaagggcagccccgagaaccacaggtgtacaccctgcccccatcccgggaggagatgaccaagaaccaggtcagcctgacctgcctggtcaaaggcttctatcccagcgacatcgccgtggagtgggagagcaatgggcagccggagaacaactacaagaccacgcctcccgtgctggactccgacggctccttcttcctctatagcaagctcaccgtggacaagagcaggtggcagcaggggaacgtcttctcatgctccgtgatgcatgaggctctgcacaaccactacacgcagaagagcctctccctgtctccgggtaaatga

SEQ ID NO: 445 - protein, 456 aa, Zika virus
METDTLLLWVLLLWVPGSTGDTRVREDYSLECDPAVIGTAVKGKEAVHSDLGYWIESEKNDTWRLKRAHLIEMKTCEWPKSHTLWTDGIEESDLIIPKSLAGPLSHHNTREGYRTQMKGPWHSEELEIRFEECPGTKVHVEETCGTRGPSLRMTTVMGRVIEEWCCRECTMPPLSFRAKDGCWYGMEIRPRKEPESNLVRSMVTAGSTDHMDHDYKDDDDKVDEPKSCDKTHTCPPCPAPELLGGPSVFLFPPKPKDTLMISRTPEVTCVVVDVSHEDPEVKFNWYVDGVEVHNAKTKPREEQYNSTYRVVSVLTVLHQDWLNGKEYKCKVSNKALPAPIEKTISKAKGQPREPQVYTLPPSREEMTKNQVSLTCLVKGFYPSDIAVEWESNGQPENNYKTTPPVLDSDGSFFLYSKLTVDKSRWQQGNVFSCSVMHEALHNHYTQKSLSLSPGKH

SEQ ID NO: 446 - protein, 15 aa, Dengue virus
ELLKTEVTNPAVLRK

SEQ ID NO: 447 - protein, 15 aa, Dengue virus
IATITPQAPTSEIQL

SEQ ID NO: 448 - protein, 15 aa, Dengue virus
WTSGASTSQETWNRQ

SEQ ID NO: 449 - protein, 15 aa, Dengue virus
TGATEIQTSGTTTIF

SEQ ID NO: 450 - protein, 15 aa, Dengue virus
VQVKYEGTDAPCKIP

SEQ ID NO: 451 - protein, 15 aa, Dengue virus
FLTQDEKGVTQNGRL

SEQ ID NO: 452 - protein, 15 aa, Dengue virus
ANPIVTDKEKPVNIE

SEQ ID NO: 453 - protein, 15 aa, Dengue virus
PVNIETEPPFGESYI

SEQ ID NO: 454 - protein, 15 aa, Dengue virus
WLPGADTQGSNWIQK

SEQ ID NO: 455 - protein, 15 aa, Dengue virus
PGADTQGSNWIQKET

SEQ ID NO: 456 - protein, 15 aa, Dengue virus
VTFKNPHAKKQDVVV

SEQ ID NO: 457 - protein, 15 aa, Dengue virus
IRVQYEGDGSPCKIP

SEQ ID NO: 458 - protein, 15 aa, Dengue virus
VQYEGDGSPCKIPFE

SEQ ID NO: 459 - protein, 15 aa, Dengue virus
PIVTEKDSPVNIEAE

SEQ ID NO: 460 - protein, 15 aa, Dengue virus
PVNIEAEPPFGDSYI

SEQ ID NO: 461 - protein, 15 aa, Dengue virus
NIEAEPPFGDSYIIV

SEQ ID NO: 462 - protein, 15 aa, Dengue virus
QHQVGNETQGVTAEI

SEQ ID NO: 463 - protein, 15 aa, Dengue virus
WTSGATTETPTWNRK

SEQ ID NO: 464 - protein, 15 aa, Dengue virus
TGATEIQNSGGTSIF

SEQ ID NO: 465 - protein, 15 aa, Dengue virus
VLKKEVSETQHGTIL

SEQ ID NO: 466 - protein, 15 aa, Dengue virus
KVEYKGEDAPCKIPF

SEQ ID NO: 467 - protein, 15 aa, Dengue virus
KVEYKGEDVPCKIPF

SEQ ID NO: 468 - protein, 15 aa, Dengue virus
PCKIPFSTEDGQGKA

SEQ ID NO: 469 - protein, 15 aa, Dengue virus
PVVTKKEEPVNIEAE

SEQ ID NO: 470 - protein, 15 aa, Dengue virus
VNIEAEPPFGESNIV

SEQ ID NO: 471 - protein, 15 aa, Dengue virus
DFELTKTTAKEVALL

SEQ ID NO: 472 - protein, 15 aa, Dengue virus
HAVGNDTSNHGVTAT

SEQ ID NO: 473 - protein, 15 aa, Dengue virus
VTATITPRSPSVEVE

SEQ ID NO: 474 - protein, 15 aa, Dengue virus
GATEVDSGDGNHMFA

SEQ ID NO: 475 - protein, 15 aa, Dengue virus
DKEMAETQHGTTVVK

SEQ ID NO: 476 - protein, 15 aa, Dengue virus
VKVKYEGAGAPCKVP

SEQ ID NO: 477 - protein, 15 aa, Dengue virus
ISSIPLAENTNSVTN

SEQ ID NO: 478 - protein, 15 aa, Dengue virus
PLAENTNSVTNIELE

SEQ ID NO: 479 - protein, 15 aa, Yellow fever virus
ETVAIDRPAEVRKVC

SEQ ID NO: 480 - protein, 15 aa, Yellow fever virus
HVGAKQENWNTDIKT

SEQ ID NO: 481 - protein, 15 aa, Yellow fever virus
LKFDALSGSQEVEFI

SEQ ID NO: 482 - protein, 15 aa, Yellow fever virus
DLTLPWQSGSGGVWR

SEQ ID NO: 483 - protein, 15 aa, Yellow fever virus
VLALGNQEGSLKTAL

SEQ ID NO: 484 - protein, 15 aa, Yellow fever virus
AMRVTKDTNDNNLYK

SEQ ID NO: 485 - protein, 15 aa, Yellow fever virus
FFVKNPTDTGHGTVV

SEQ ID NO: 486 - protein, 15 aa, Yellow fever virus
VNPIASTNDDEVLIE

SEQ ID NO: 487 - protein, 15 aa, Yellow fever virus
VTVNPIASTNDDEVL

SEQ ID NO: 488 - protein, 15 aa, Yellow fever virus
VLIEVNPPFGDSYII

SEQ ID NO: 489 - protein, 15 aa, West Nile virus
TIMSKDKPTIDVKMM

SEQ ID NO: 490 - protein, 15 aa, West Nile virus
FVHGPTTVESHGKIG

SEQ ID NO: 491 - protein, 15 aa, West Nile virus
VTVDCEPRSGIDTSA

SEQ ID NO: 492 - protein, 15 aa, West Nile virus
SVVALGSQEGALHQA

SEQ ID NO: 493 - protein, 15 aa, West Nile virus
EKLQLKGTTYGVCSK

SEQ ID NO: 494 - protein, 15 aa, West Nile virus
KFARTPADTGHGTVV

SEQ ID NO: 495 - protein, 15 aa, West Nile virus
LELQYTGTDGPCKVP

SEQ ID NO: 496 - protein, 15 aa, West Nile virus
YIVVGRGEQQINHHW

SEQ ID NO: 497 - protein, 15 aa, Zika virus
DFVEGMSGGTWVDIV

SEQ ID NO: 498 - protein, 15 aa, Zika virus
TVMAQDKPTVDIELV

SEQ ID NO: 499 - protein, 15 aa, Zika virus
AYLDKQSDTQYVCKR

SEQ ID NO: 500 - protein, 15 aa, Zika virus
SKKMTGKSIQPENLE

SEQ ID NO: 501 - protein, 15 aa, Zika virus
IMLSVHGSQHSGMIV

SEQ ID NO: 502 - protein, 15 aa, Zika virus
VNDTGHETDENRAKV

SEQ ID NO: 503 - protein, 15 aa, Zika virus
KVEITPNSPRAEATL

SEQ ID NO: 504 - protein, 15 aa, Zika virus
ITPNSPRAEATLGGF

SEQ ID NO: 505 - protein, 15 aa, Zika virus
AGADTGTPHWNNKEA

SEQ ID NO: 506 - protein, 15 aa, Zika virus
EMDGAKGRLSSGHLK

SEQ ID NO: 507 - protein, 15 aa, Zika virus
EVQYAGTDGPCKVPA

SEQ ID NO: 508 - protein, 15 aa, Zika virus
ITANPVITESTENSK

SEQ ID NO: 509 - protein, 15 aa, Zika virus
NPVITESTENSKMML

SEQ ID NO: 510 - protein, 15 aa, Zika virus
VITESTENSKMMLEL

SEQ ID NO: 511 - protein, 15 aa, chikungunya virus
ALERIRNEATDGTLK

SEQ ID NO: 512 - protein, 15 aa, chikungunya virus
GREKFHSRPQHGKEL

SEQ ID NO: 513 - protein, 15 aa, chikungunya virus
VPRNAELGDRKGKIH

SEQ ID NO: 514 - protein, 15 aa, chikungunya virus
RVPKARNPTVTYGKN

SEQ ID NO: 515 - protein, 15 aa, chikungunya virus
PKARNPTVTYGKNQV

SEQ ID NO: 516 - protein, 15 aa, chikungunya virus
SYRNMGEEPNYQEEW

SEQ ID NO: 517 - protein, 15 aa, chikungunya virus
EVTWGNNEPYKYWPQ

SEQ ID NO: 518 - protein, 15 aa, chikungunya virus
PQLSTNGTAHGHPHE

SEQ ID NO: 519 - protein, 5 aa, Dengue virus
EVTNP

SEQ ID NO: 520 - protein, 5 aa, Dengue virus
PQAPT

SEQ ID NO: 521 - protein, 5 aa, Dengue virus
STSQE

SEQ ID NO: 522 - protein, 5 aa, Dengue virus
IQTSG

SEQ ID NO: 523 - protein, 5 aa, Dengue virus
EGTDA

SEQ ID NO: 524 - protein, 5 aa, Dengue virus
EKGVT

SEQ ID NO: 525 - protein, 5 aa, Dengue virus
TDKEK

SEQ ID NO: 526 - protein, 5 aa, Dengue virus
TEPPF

SEQ ID NO: 527 - protein, 5 aa, Dengue virus
DTQGS

SEQ ID NO: 528 - protein, 5 aa, Dengue virus
QGSNW

SEQ ID NO: 529 - protein, 5 aa, Dengue virus
PHAKK

SEQ ID NO: 530 - protein, 5 aa, Dengue virus
EGDGS

SEQ ID NO: 531 - protein, 5 aa, Dengue virus
DGSPC

SEQ ID NO: 532 - protein, 5 aa, Dengue virus
KDSPV

SEQ ID NO: 533 - protein, 5 aa, Dengue virus
AEPPF

SEQ ID NO: 534 - protein, 5 aa, Dengue virus
PPFGD

SEQ ID NO: 535 - protein, 5 aa, Dengue virus
NETQG

SEQ ID NO: 536 - protein, 5 aa, Dengue virus
TTETP

SEQ ID NO: 537 - protein, 5 aa, Dengue virus
IQNSG

SEQ ID NO: 538 - protein, 5 aa, Dengue virus
VSETQ

SEQ ID NO: 539 - protein, 5 aa, Dengue virus
GEDAP

SEQ ID NO: 540 - protein, 5 aa, Dengue virus
GEDVP

SEQ ID NO: 541 - protein, 5 aa, Dengue virus
FSTED

SEQ ID NO: 542 - protein, 5 aa, Dengue virus
KEEPV

SEQ ID NO: 543 - protein, 5 aa, Dengue virus
EPPFG

SEQ ID NO: 544 - protein, 5 aa, Dengue virus
KTTAK

SEQ ID NO: 545 - protein, 5 aa, Dengue virus
DTSNH

SEQ ID NO: 546 - protein, 5 aa, Dengue virus
TPRSP

SEQ ID NO: 547 - protein, 5 aa, Dengue virus
DSGDG

SEQ ID NO: 548 - protein, 5 aa, Dengue virus
ETQHG

SEQ ID NO: 549 - protein, 5 aa, Dengue virus
EGAGA

SEQ ID NO: 550 - protein, 5 aa, Dengue virus
LAENT

SEQ ID NO: 551 - protein, 5 aa, Dengue virus
TNSVT

SEQ ID NO: 552 - protein, 5 aa, Dengue virus
ETQHG

SEQ ID NO: 553 - protein, 5 aa, Dengue virus
EPPFG

SEQ ID NO: 554 - protein, 5 aa, Dengue virus
DRGWG

SEQ ID NO: 555 - protein, 5 aa, Dengue virus
SPRTG

SEQ ID NO: 556 - protein, 5 aa, Dengue virus
TARGA

SEQ ID NO: 557 - protein, 5 aa, Dengue virus
GSSIG

SEQ ID NO: 558 - protein, 5 aa, Dengue virus
RCPTQ

SEQ ID NO: 559 - protein, 5 aa, Dengue virus
PPFGD

SEQ ID NO: 560 - protein, 5 aa, Yellow fever virus
DRPAE

SEQ ID NO: 561 - protein, 5 aa, Yellow fever virus
QENWN

SEQ ID NO: 562 - protein, 5 aa, Yellow fever virus
LSGSQ

SEQ ID NO: 563 - protein, 5 aa, Yellow fever virus
WQSGS

SEQ ID NO: 564 - protein, 5 aa, Yellow fever virus
NQEGS

SEQ ID NO: 565 - protein, 5 aa, Yellow fever virus
KDTND

SEQ ID NO: 566 - protein, 5 aa, Yellow fever virus
PTDTG

SEQ ID NO: 567 - protein, 5 aa, Yellow fever virus
STNDD

SEQ ID NO: 568 - protein, 5 aa, Yellow fever virus
IASTN

SEQ ID NO: 569 - protein, 5 aa, Yellow fever virus
NPPFG

SEQ ID NO: 570 - protein, 5 aa, Zika virus
QSDTQ

SEQ ID NO: 571 - protein, 5 aa, Zika virus
GKSIQ

SEQ ID NO: 572 - protein, 5 aa, Zika virus
HGSQH

SEQ ID NO: 573 - protein, 5 aa, Zika virus
HETDE

SEQ ID NO: 574 - protein, 5 aa, Zika virus
PNSPR

SEQ ID NO: 575 - protein, 5 aa, Zika virus
PRAEA

SEQ ID NO: 576 - protein, 5 aa, Zika virus
GTPHW

SEQ ID NO: 577 - protein, 5 aa, Zika virus
KGRLS

SEQ ID NO: 578 - protein, 5 aa, Zika virus
GTDGP

SEQ ID NO: 579 - protein, 5 aa, Zika virus
VITES

SEQ ID NO: 580 - protein, 5 aa, Zika virus
ESTEN

SEQ ID NO: 581 - protein, 5 aa, Zika virus
TENSK

SEQ ID NO: 582 - protein, 5 aa, chikungunya virus
RNEAT

SEQ ID NO: 583 - protein, 5 aa, chikungunya virus
HSRPQ

SEQ ID NO: 584 - protein, 5 aa, chikungunya virus
EFGDR

SEQ ID NO: 585 - protein, 5 aa, chikungunya virus
RNPTV

SEQ ID NO: 586 - protein, 5 aa, chikungunya virus
PTVTY

SEQ ID NO: 587 - protein, 5 aa, chikungunya virus
GEEPN

SEQ ID NO: 588 - protein, 5 aa, chikungunya virus
NNEPY

SEQ ID NO: 589 - protein, 5 aa, chikungunya virus
NGTAH

SEQ ID NO: 590 - protein, 15 aa, Dengue virus
YKFQADSPKRLSAAI

SEQ ID NO: 591 - protein, 15 aa, Dengue virus
AQGKKMIRPQPMEHK

SEQ ID NO: 592 - protein, 15 aa, Dengue virus
IDGPDTPECPDGQRA

SEQ ID NO: 593 - protein, 15 aa, Dengue virus
PDTPECPDGQRAWNI

SEQ ID NO: 594 - protein, 15 aa, Dengue virus
MSAAIKDSKAVHADM

SEQ ID NO: 595 - protein, 15 aa, Dengue virus
YWIESEKNETWKLAR

SEQ ID NO: 596 - protein, 15 aa, Dengue virus
DEHCGNRGPSLRTTT

SEQ ID NO: 597 - protein, 15 aa, Dengue virus
GPSLRTTTVTGKIIH

SEQ ID NO: 598 - protein, 15 aa, Dengue virus
KFQPESPSKLASAIQ

SEQ ID NO: 599 - protein, 15 aa, Dengue virus
AGKRSLRPQPTELKY

SEQ ID NO: 600 - protein, 15 aa, Dengue virus
KAKMLSTESHNQTFL

SEQ ID NO: 601 - protein, 15 aa, Dengue virus
DGPETAECPNTNRAW

SEQ ID NO: 602 - protein, 15 aa, Dengue virus
SAAIKDNRAVHADMG

SEQ ID NO: 603 - protein, 15 aa, Dengue virus
IIPKNFAGPVSQHNY

SEQ ID NO: 604 - protein, 15 aa, Dengue virus
YRPGYHTQTAGPWHL

SEQ ID NO: 605 - protein, 15 aa, Dengue virus
VVVTEDCGNRGPSLR

SEQ ID NO: 606 - protein, 15 aa, Dengue virus
QYKFQADSPKRLATA

SEQ ID NO: 607 - protein, 15 aa, Dengue virus
LKQGKRTLTPQPMEL

SEQ ID NO: 608 - protein, 15 aa, Dengue virus
IIDGPNTPECPSASR

SEQ ID NO: 609 - protein, 15 aa, Dengue virus
MSAAVKDERAVHADM

SEQ ID NO: 610 - protein, 15 aa, Dengue virus
WIESQKNGSWKLEKA

SEQ ID NO: 611 - protein, 15 aa, Dengue virus
ISQHNHRPGYHTQTA

SEQ ID NO: 612 - protein, 15 aa, Dengue virus
TVVITENCGTRGPSL

SEQ ID NO: 613 - protein, 15 aa, Dengue virus
GPSLRTTTVSGKLIH

SEQ ID NO: 614 - protein, 15 aa, Dengue virus
KFQPESPARLASAIL

SEQ ID NO: 615 - protein, 15 aa, Dengue virus
TKGKRALTPPVSDLK

SEQ ID NO: 616 - protein, 15 aa, Dengue virus
GKAKIFTPEARNSTF

SEQ ID NO: 617 - protein, 15 aa, Dengue virus
LIDGPDTSECPNERR

SEQ ID NO: 618 - protein, 15 aa, Dengue virus
WIESSKNQTWQIEKA

SEQ ID NO: 619 - protein, 15 aa, Dengue virus
LIPKSYAGPFSQHNY

SEQ ID NO: 620 - protein, 15 aa, Dengue virus
HNYRQGYATQTVGPW

SEQ ID NO: 621 - protein, 15 aa, Dengue virus
TIQEDCDHRGPSLRT

SEQ ID NO: 622 - protein, 15 aa, West Nile virus
RYKYYPETPQGLAKI

SEQ ID NO: 623 - protein, 15 aa, West Nile virus
GMYKSAPKRLTATTE

SEQ ID NO: 624 - protein, 15 aa, West Nile virus
GPETKECPTQNRAWN

SEQ ID NO: 625 - protein, 15 aa, West Nile virus
KVRESNTTECDSKII

SEQ ID NO: 626 - protein, 15 aa, West Nile virus
HNRRPGYKTQNQGPW

SEQ ID NO: 627 - protein, 15 aa, West Nile virus
GYKTQNQGPWDEGRV

SEQ ID NO: 628 - protein, 15 aa, West Nile virus
SCGHRGPATRTTTES

SEQ ID NO: 629 - protein, 15 aa, West Nile virus
PATRTTTESGKLITD

SEQ ID NO: 630 - protein, 15 aa, Yellow fever virus
LNKYSYYPEDPVKLA

SEQ ID NO: 631 - protein, 15 aa, Yellow fever virus
IIDGKSRKECPFSNR

SEQ ID NO: 632 - protein, 15 aa, Yellow fever virus
AVNGKKSAHGSPTFW

SEQ ID NO: 633 - protein, 15 aa, Yellow fever virus
LTHTIGTSVEESEMF

SEQ ID NO: 634 - protein, 15 aa, Yellow fever virus
PGYKVQTNGPWMQVP

SEQ ID NO: 635 - protein, 15 aa, Yellow fever virus
GNCDGRGKSTRSTTD

SEQ ID NO: 636 - protein, 15 aa, Yellow fever virus
GKSTRSTTDSGKVIP

SEQ ID NO: 637 - protein, 15 aa, Yellow fever virus
PMEIRPRKTHESHLV

SEQ ID NO: 638 - protein, 15 aa, Zika virus
VDFSKKETRCGTGVF

SEQ ID NO: 639 - protein, 15 aa, Zika virus
DRYKYHPDSPRRLAA

SEQ ID NO: 640 - protein, 15 aa, Zika virus
HFVRAAKTNNSFVVD

SEQ ID NO: 641 - protein, 15 aa, Zika virus
GTAVKGKEAVHSDLG

SEQ ID NO: 642 - protein, 15 aa, Zika virus
WIESEKNDTWRLKRA

SEQ ID NO: 643 - protein, 15 aa, Zika virus
LSHHNTREGYRTQMK

SEQ ID NO: 644 - protein, 15 aa, Zika virus
TKVHVEETCGTRGPS

SEQ ID NO: 645 - protein, 15 aa, Zika virus
GPSLRSTTASGRVIE

SEQ ID NO: 646 - protein, 15 aa, Zika virus
MEIRPRKEPESNLVR

SEQ ID NO: 647 - protein, 5 aa, Dengue virus
DSPKR

SEQ ID NO: 648 - protein, 5 aa, Dengue virus
MIRPQ

SEQ ID NO: 649 - protein, 5 aa, Dengue virus
TPECP

SEQ ID NO: 650 - protein, 5 aa, Dengue virus
CPDGQ

SEQ ID NO: 651 - protein, 5 aa, Dengue virus
KDSKA

SEQ ID NO: 652 - protein, 5 aa, Dengue virus
EKNET

SEQ ID NO: 653 - protein, 5 aa, Dengue virus
NRGPS

SEQ ID NO: 654 - protein, 5 aa, Dengue virus
TTTVT

SEQ ID NO: 655 - protein, 5 aa, Dengue virus
SPSKL

SEQ ID NO: 656 - protein, 5 aa, Dengue virus
LRPQP

SEQ ID NO: 657 - protein, 5 aa, Dengue virus
STESH

SEQ ID NO: 658 - protein, 5 aa, Dengue virus
AECPN

SEQ ID NO: 659 - protein, 5 aa, Dengue virus
DNRAV

SEQ ID NO: 660 - protein, 5 aa, Dengue virus
FAGPV

SEQ ID NO: 661 - protein, 5 aa, Dengue virus
HTQTA

SEQ ID NO: 662 - protein, 5 aa, Dengue virus
DCGNR

SEQ ID NO: 663 - protein, 5 aa, Dengue virus
ADSPK

SEQ ID NO: 664 - protein, 5 aa, Dengue virus
RTLTP

SEQ ID NO: 665 - protein, 5 aa, Dengue virus
NTPEC

SEQ ID NO: 666 - protein, 5 aa, Dengue virus
KDERA

SEQ ID NO: 667 - protein, 5 aa, Dengue virus
KNGSW

SEQ ID NO: 668 - protein, 5 aa, Dengue virus
HRPGY

SEQ ID NO: 669 - protein, 5 aa, Dengue virus
ENCGT

SEQ ID NO: 670 - protein, 5 aa, Dengue virus
TTTVS

SEQ ID NO: 671 - protein, 5 aa, Dengue virus
SPARL

SEQ ID NO: 672 - protein, 5 aa, Dengue virus
ALTPP

SEQ ID NO: 673 - protein, 5 aa, Dengue virus
FTPEA

SEQ ID NO: 674 - protein, 5 aa, Dengue virus
DTSEC

SEQ ID NO: 675 - protein, 5 aa, Dengue virus
KNQTW

SEQ ID NO: 676 - protein, 5 aa, Dengue virus
YAGPF

SEQ ID NO: 677 - protein, 5 aa, Dengue virus
GYATQ

SEQ ID NO: 678 - protein, 5 aa, Dengue virus
CDHRG

SEQ ID NO: 679 - protein, 5 aa, West Nile virus
PETPQ

SEQ ID NO: 680 - protein, 5 aa, West Nile virus
APKRL

SEQ ID NO: 681 - protein, 5 aa, West Nile virus
ECPTQ

SEQ ID NO: 682 - protein, 5 aa, West Nile virus
NTTEC

SEQ ID NO: 683 - protein, 5 aa, West Nile virus
GYKTQ

SEQ ID NO: 684 - protein, 5 aa, West Nile virus
NQGPW

SEQ ID NO: 685 - protein, 5 aa, West Nile virus
GPATR

SEQ ID NO: 686 - protein, 5 aa, West Nile virus
TTESG

SEQ ID NO: 687 - protein, 5 aa, Yellow fever virus
YYPED

SEQ ID NO: 688 - protein, 5 aa, Yellow fever virus
SRKEC

SEQ ID NO: 689 - protein, 5 aa, Yellow fever virus
KSAHG

SEQ ID NO: 690 - protein, 5 aa, Yellow fever virus
GTSVE

SEQ ID NO: 691 - protein, 5 aa, Yellow fever virus
QTNGP

SEQ ID NO: 692 - protein, 5 aa, Yellow fever virus
RGKST

SEQ ID NO: 693 - protein, 5 aa, Yellow fever virus
STTDS

SEQ ID NO: 694 - protein, 5 aa, Yellow fever virus
PRKTH

SEQ ID NO: 695 - protein, 5 aa, Zika virus
KETRC

SEQ ID NO: 696 - protein, 5 aa, Zika virus
HPDSP

SEQ ID NO: 697 - protein, 5 aa, Zika virus
AKTNN

SEQ ID NO: 698 - protein, 5 aa, Zika virus
GKEAV

SEQ ID NO: 699 - protein, 5 aa, Zika virus
KNDTW

SEQ ID NO: 700 - protein, 5 aa, Zika virus
TREGY

SEQ ID NO: 701 - protein, 5 aa, Zika virus
EETCG

SEQ ID NO: 702 - protein, 5 aa, Zika virus
STTAS

SEQ ID NO: 703 - protein, 5 aa, Zika virus
RKEPE

SEQ ID NO: 704 - protein, 5 aa, Zika virus
KEKKR

SEQ ID NO: 705 - protein, 5 aa, Zika virus
ASDSR

SEQ ID NO: 706 - protein, 5 aa, Zika virus
SRCPT

SEQ ID NO: 707 - protein, 5 aa, Zika virus
CPTQG

SEQ ID NO: 708 - protein, 5 aa, Zika virus
PTQGE

SEQ ID NO: 709 - protein, 5 aa, Zika virus
TQGEA

SEQ ID NO: 710 - protein, 5 aa, Zika virus
DKQSD

SEQ ID NO: 711 - protein, 5 aa, Zika virus
QSDTQ

SEQ ID NO: 712 - protein, 5 aa, Zika virus
KMTGK

SEQ ID NO: 713 - protein, 5 aa, Zika virus
NDTGH

SEQ ID NO: 714 - protein, 5 aa, Zika virus
ETDEN

SEQ ID NO: 715 - protein, 5 aa, Zika virus
TDENR

SEQ ID NO: 716 - protein, 5 aa, Zika virus
NSPRA

SEQ ID NO: 717 - protein, 5 aa, Zika virus
SPRAE

SEQ ID NO: 718 - protein, 5 aa, Zika virus
RAEAT

SEQ ID NO: 719 - protein, 5 aa, Zika virus
AGADT

SEQ ID NO: 720 - protein, 5 aa, Zika virus
GADTG

SEQ ID NO: 721 - protein, 5 aa, Zika virus
ADTGT

SEQ ID NO: 722 - protein, 5 aa, Zika virus
DTGTP

SEQ ID NO: 723 - protein, 5 aa, Zika virus
GAKGR

SEQ ID NO: 724 - protein, 5 aa, Zika virus
KGRLS

SEQ ID NO: 725 - protein, 5 aa, Zika virus
ASDSR

SEQ ID NO: 726 - protein, 5 aa, Zika virus
AGTDG

SEQ ID NO: 727 - protein, 5 aa, Zika virus
GTDGP

SEQ ID NO: 728 - protein, 5 aa, Zika virus
TDGPC

SEQ ID NO: 729 - protein, 5 aa, Zika virus
DGPCK

SEQ ID NO: 730 - protein, 5 aa, Zika virus
ITEST

SEQ ID NO: 731 - protein, 5 aa, Zika virus
TESTE

SEQ ID NO: 732 - protein, 5 aa, Zika virus
ESTEN

SEQ ID NO: 733 - protein, 5 aa, Zika virus
STENS

SEQ ID NO: 734 - protein, 5 aa, Zika virus
TENSK

SEQ ID NO: 735 - protein, 5 aa, Zika virus
GSTIG

SEQ ID NO: 736 - protein, 5 aa, Zika virus
NTKNG

SEQ ID NO: 737 - protein, 5 aa, Zika virus
TKNGS

SEQ ID NO: 738 - protein, 5 aa, Zika virus
AGTDG

SEQ ID NO: 739 - protein, 5 aa, Zika virus
SKKET

SEQ ID NO: 740 - protein, 5 aa, Zika virus
KKETR

SEQ ID NO: 741 - protein, 5 aa, Zika virus
YHPDS

SEQ ID NO: 742 - protein, 5 aa, Zika virus
HPDSP

SEQ ID NO: 743 - protein, 5 aa, Zika virus
DSPRR

SEQ ID NO: 744 - protein, 5 aa, Zika virus
AKTNN

SEQ ID NO: 745 - protein, 5 aa, Zika virus
KTNNS

SEQ ID NO: 746 - protein, 5 aa, Zika virus
KGKEA

SEQ ID NO: 747 - protein, 5 aa, Zika virus
SEKND

SEQ ID NO: 748 - protein, 5 aa, Zika virus
EKNDT

SEQ ID NO: 749 - protein, 5 aa, Zika virus
NTREG

SEQ ID NO: 750 - protein, 5 aa, Zika virus
GTRGP

SEQ ID NO: 751 - protein, 5 aa, Zika virus
TRGPS

SEQ ID NO: 752 - protein, 5 aa, Zika virus
LRSTT

SEQ ID NO: 753 - protein, 5 aa, Zika virus
STTAS

SEQ ID NO: 754 - protein, 5 aa, Zika virus
TTASG

SEQ ID NO: 755 - protein, 5 aa, Zika virus
TASGR

SEQ ID NO: 756 - protein, 5 aa, Zika virus
RPRKE

SEQ ID NO: 757 - protein, 5 aa, Zika virus
KEPES

SEQ ID NO: 758 - protein, 5 aa, Zika virus
EPESN

SEQ ID NO: 759 - protein, 5 aa, West Nile virus
KDKPT

SEQ ID NO: 760 - protein, 5 aa, West Nile virus
NEKRA

SEQ ID NO: 761 - protein, 5 aa, West Nile virus
EKRAD

SEQ ID NO: 762 - protein, 5 aa, West Nile virus
KRADP

SEQ ID NO: 763 - protein, 5 aa, West Nile virus
TTVES

SEQ ID NO: 764 - protein, 5 aa, West Nile virus
GKIGA

SEQ ID NO: 765 - protein, 5 aa, West Nile virus
ITPSA

SEQ ID NO: 766 - protein, 5 aa, West Nile virus
TPSAP

SEQ ID NO: 767 - protein, 5 aa, West Nile virus
PSAPS

SEQ ID NO: 768 - protein, 5 aa, West Nile virus
EPRSG

SEQ ID NO: 769 - protein, 5 aa, West Nile virus
SSAGS

SEQ ID NO: 770 - protein, 5 aa, West Nile virus
SAGST

SEQ ID NO: 771 - protein, 5 aa, West Nile virus
AGSTT

SEQ ID NO: 772 - protein, 5 aa, West Nile virus
GSQEG

SEQ ID NO: 773 - protein, 5 aa, West Nile virus
SQEGA

SEQ ID NO: 774 - protein, 5 aa, West Nile virus
ARTPA

SEQ ID NO: 775 - protein, 5 aa, West Nile virus
PADTG

SEQ ID NO: 776 - protein, 5 aa, West Nile virus
DTGHG

SEQ ID NO: 777 - protein, 5 aa, West Nile virus
GTDGP

SEQ ID NO: 778 - protein, 5 aa, West Nile virus
TDGPC

SEQ ID NO: 779 - protein, 5 aa, West Nile virus
KSGSS

SEQ ID NO: 780 - protein, 5 aa, West Nile virus
SGSSI

SEQ ID NO: 781 - protein, 5 aa, West Nile virus
GSSIG

SEQ ID NO: 782 - protein, 5 aa, Dengue virus
KNKPT

SEQ ID NO: 783 - protein, 5 aa, Dengue virus
KPTLD

SEQ ID NO: 784 - protein, 5 aa, Dengue virus
KTEAT

SEQ ID NO: 785 - protein, 5 aa, Dengue virus
SRCPT

SEQ ID NO: 786 - protein, 5 aa, Dengue virus
CPTQG

SEQ ID NO: 787 - protein, 5 aa, Dengue virus
PTQGE

SEQ ID NO: 788 - protein, 5 aa, Dengue virus
PEEQD

SEQ ID NO: 789 - protein, 5 aa, Dengue virus
EEQDQ

SEQ ID NO: 790 - protein, 5 aa, Dengue virus
QVGNE

SEQ ID NO: 791 - protein, 5 aa, Dengue virus
NETQG

SEQ ID NO: 792 - protein, 5 aa, Dengue virus
PQAST

SEQ ID NO: 793 - protein, 5 aa, Dengue virus
QASTT

SEQ ID NO: 794 - protein, 5 aa, Dengue virus
ASTTE

SEQ ID NO: 795 - protein, 5 aa, Dengue virus
TSGAT

SEQ ID NO: 796 - protein, 5 aa, Dengue virus
SGATT

SEQ ID NO: 797 - protein, 5 aa, Dengue virus
GATTE

SEQ ID NO: 798 - protein, 5 aa, Dengue virus
ATTET

SEQ ID NO: 799 - protein, 5 aa, Dengue virus
TTETP

SEQ ID NO: 800 - protein, 5 aa, Dengue virus
TETPT

SEQ ID NO: 801 - protein, 5 aa, Dengue virus
QNSGG

SEQ ID NO: 802 - protein, 5 aa, Dengue virus
NSGGT

SEQ ID NO: 803 - protein, 5 aa, Dengue virus
SGGTS

SEQ ID NO: 804 - protein, 5 aa, Dengue virus
VSETQ

SEQ ID NO: 805 - protein, 5 aa, Dengue virus
SETQH

SEQ ID NO: 806 - protein, 5 aa, Dengue virus
YKGED

SEQ ID NO: 807 - protein, 5 aa, Dengue virus
KGEDA

SEQ ID NO: 808 - protein, 5 aa, Dengue virus
GEDAP

SEQ ID NO: 809 - protein, 5 aa, Dengue virus
STEDG

SEQ ID NO: 810 - protein, 5 aa, Dengue virus
TEDGQ

SEQ ID NO: 811 - protein, 5 aa, Dengue virus
EDGQG

SEQ ID NO: 812 - protein, 5 aa, Dengue virus
DGQGK

SEQ ID NO: 813 - protein, 5 aa, Dengue virus
QGKAH

SEQ ID NO: 814 - protein, 5 aa, Dengue virus
TKKEE

SEQ ID NO: 815 - protein, 5 aa, Dengue virus
KKEEP

SEQ ID NO: 816 - protein, 5 aa, Dengue virus
EAEPP

SEQ ID NO: 817 - protein, 5 aa, Dengue virus
EPPFG

SEQ ID NO: 818 - protein, 5 aa, Dengue virus
KKGSS

SEQ ID NO: 819 - protein, 5 aa, Dengue virus
GSSIG

SEQ ID NO: 820 - protein, 5 aa, Dengue virus
NSKNT

SEQ ID NO: 821 - protein, 5 aa, Dengue virus
SKNTS

SEQ ID NO: 822 - protein, 5 aa, Dengue virus
KNTSM

SEQ ID NO: 823 - protein, 5 aa, Dengue virus
QGKPT

SEQ ID NO: 824 - protein, 5 aa, Dengue virus
TKTTA

SEQ ID NO: 825 - protein, 5 aa, Dengue virus
KTTAK

SEQ ID NO: 826 - protein, 5 aa, Dengue virus
TTAKE

SEQ ID NO: 827 - protein, 5 aa, Dengue virus
CPTQG

SEQ ID NO: 828 - protein, 5 aa, Dengue virus
PTQGE

SEQ ID NO: 829 - protein, 5 aa, Dengue virus
TQGEP

SEQ ID NO: 830 - protein, 5 aa, Dengue virus
LKEEQ

SEQ ID NO: 831 - protein, 5 aa, Dengue virus
KEEQD

SEQ ID NO: 832 - protein, 5 aa, Dengue virus
EEQDQ

SEQ ID NO: 833 - protein, 5 aa, Dengue virus
GDTHA

SEQ ID NO: 834 - protein, 5 aa, Dengue virus
GNDTS

SEQ ID NO: 835 - protein, 5 aa, Dengue virus
TPRSP

SEQ ID NO: 836 - protein, 5 aa, Dengue virus
PRSPS

SEQ ID NO: 837 - protein, 5 aa, Dengue virus
AGADT

SEQ ID NO: 838 - protein, 5 aa, Dengue virus
SQEGA

SEQ ID NO: 839 - protein, 5 aa, Dengue virus
AGATE

SEQ ID NO: 840 - protein, 5 aa, Dengue virus
GATEV

SEQ ID NO: 841 - protein, 5 aa, Dengue virus
VDSGD

SEQ ID NO: 842 - protein, 5 aa, Dengue virus
DSGDG

SEQ ID NO: 843 - protein, 5 aa, Dengue virus
SGDGN

SEQ ID NO: 844 - protein, 5 aa, Dengue virus
GDGNH

SEQ ID NO: 845 - protein, 5 aa, Dengue virus
AETQH

SEQ ID NO: 846 - protein, 5 aa, Dengue virus
EGAGA

SEQ ID NO: 847 - protein, 5 aa, Dengue virus
AENTN

SEQ ID NO: 848 - protein, 5 aa, Dengue virus
NTNSV

SEQ ID NO: 849 - protein, 5 aa, Dengue virus
EPPFG

SEQ ID NO: 850 - protein, 5 aa, Dengue virus
NSRNT

SEQ ID NO: 851 - protein, 5 aa, Dengue virus
SRNTS

SEQ ID NO: 852 - protein, 5 aa, Yellow fever virus
DKPSL

SEQ ID NO: 853 - protein, 5 aa, Yellow fever virus
DRPAE

SEQ ID NO: 854 - protein, 5 aa, Yellow fever virus
PSTGE

SEQ ID NO: 855 - protein, 5 aa, Yellow fever virus
STGEA

SEQ ID NO: 856 - protein, 5 aa, Yellow fever virus
AEENE

SEQ ID NO: 857 - protein, 5 aa, Yellow fever virus
EENEG

SEQ ID NO: 858 - protein, 5 aa, Yellow fever virus
ENEGD

SEQ ID NO: 859 - protein, 5 aa, Yellow fever virus
NEGDN

SEQ ID NO: 860 - protein, 5 aa, Yellow fever virus
TYSDR

SEQ ID NO: 861 - protein, 5 aa, Yellow fever virus
AKQEN

SEQ ID NO: 862 - protein, 5 aa, Yellow fever virus
ALSGS

SEQ ID NO: 863 - protein, 5 aa, Yellow fever virus
LSGSQ

SEQ ID NO: 864 - protein, 5 aa, Yellow fever virus
SGSQE

SEQ ID NO: 865 - protein, 5 aa, Yellow fever virus
QSGSG

SEQ ID NO: 866 - protein, 5 aa, Yellow fever virus
SGSGG

SEQ ID NO: 867 - protein, 5 aa, Yellow fever virus
GSGGV

SEQ ID NO: 868 - protein, 5 aa, Yellow fever virus
GNQEG

SEQ ID NO: 869 - protein, 5 aa, Yellow fever virus
NQEGS

SEQ ID NO: 870 - protein, 5 aa, Yellow fever virus
QEGSL

SEQ ID NO: 871 - protein, 5 aa, Yellow fever virus
VTKDT

SEQ ID NO: 872 - protein, 5 aa, Yellow fever virus
TKDTN

SEQ ID NO: 873 - protein, 5 aa, Yellow fever virus
KDTND

SEQ ID NO: 874 - protein, 5 aa, Yellow fever virus
DTNDN

SEQ ID NO: 875 - protein, 5 aa, Yellow fever virus
TNDNN

SEQ ID NO: 876 - protein, 5 aa, Yellow fever virus
KNPTD

SEQ ID NO: 877 - protein, 5 aa, Yellow fever virus
NPTDT

SEQ ID NO: 878 - protein, 5 aa, Yellow fever virus
DTGHG

SEQ ID NO: 879 - protein, 5 aa, Yellow fever virus
TGHGT

SEQ ID NO: 880 - protein, 5 aa, Yellow fever virus
SKGAP

SEQ ID NO: 881 - protein, 5 aa, Yellow fever virus
KGAPC

SEQ ID NO: 882 - protein, 5 aa, Yellow fever virus
ASTND

SEQ ID NO: 883 - protein, 5 aa, Yellow fever virus
STNDD

SEQ ID NO: 884 - protein, 5 aa, Yellow fever virus
NPPFG

SEQ ID NO: 885 - protein, 5 aa, Yellow fever virus
HKEGS

SEQ ID NO: 886 - protein, 5 aa, Yellow fever virus
KEGSS

SEQ ID NO: 887 - protein, 5 aa, Yellow fever virus
GSSIG

SEQ ID NO: 888 - protein, 5 aa, Dengue virus
KNKPT

SEQ ID NO: 889 - protein, 5 aa, Dengue virus
EAKQP

SEQ ID NO: 890 - protein, 5 aa, Dengue virus
TTTES

SEQ ID NO: 891 - protein, 5 aa, Dengue virus
TTESR

SEQ ID NO: 892 - protein, 5 aa, Dengue virus
SRCPT

SEQ ID NO: 893 - protein, 5 aa, Dengue virus
CPTQG

SEQ ID NO: 894 - protein, 5 aa, Dengue virus
PTQGE

SEQ ID NO: 895 - protein, 5 aa, Dengue virus
TQGEP

SEQ ID NO: 896 - protein, 5 aa, Dengue virus
QGEPS

SEQ ID NO: 897 - protein, 5 aa, Dengue virus
NEEQD

SEQ ID NO: 898 - protein, 5 aa, Dengue virus
EEQDK

SEQ ID NO: 899 - protein, 5 aa, Dengue virus
SGEEH

SEQ ID NO: 900 - protein, 5 aa, Dengue virus
GEEHA

SEQ ID NO: 901 - protein, 5 aa, Dengue virus
GNDTG

SEQ ID NO: 902 - protein, 5 aa, Dengue virus
NDTGK

SEQ ID NO: 903 - protein, 5 aa, Dengue virus
DTGKH

SEQ ID NO: 904 - protein, 5 aa, Dengue virus
TGKHG

SEQ ID NO: 905 - protein, 5 aa, Dengue virus
GKHGK

SEQ ID NO: 906 - protein, 5 aa, Dengue virus
KHGKE

SEQ ID NO: 907 - protein, 5 aa, Dengue virus
TPQSS

SEQ ID NO: 908 - protein, 5 aa, Dengue virus
PQSST

SEQ ID NO: 909 - protein, 5 aa, Dengue virus
QSSTT

SEQ ID NO: 910 - protein, 5 aa, Dengue virus
SSTTE

SEQ ID NO: 911 - protein, 5 aa, Dengue virus
STTEA

SEQ ID NO: 912 - protein, 5 aa, Dengue virus
TTEAE

SEQ ID NO: 913 - protein, 5 aa, Dengue virus
GADTQ

SEQ ID NO: 914 - protein, 5 aa, Dengue virus
ADTQG

SEQ ID NO: 915 - protein, 5 aa, Dengue virus
DTQGS

SEQ ID NO: 916 - protein, 5 aa, Dengue virus
TQGSN

SEQ ID NO: 917 - protein, 5 aa, Dengue virus
PHAKK

SEQ ID NO: 918 - protein, 5 aa, Dengue virus
AETQH

SEQ ID NO: 919 - protein, 5 aa, Dengue virus
YEGDG

SEQ ID NO: 920 - protein, 5 aa, Dengue virus
EGDGS

SEQ ID NO: 921 - protein, 5 aa, Dengue virus
GDGSP

SEQ ID NO: 922 - protein, 5 aa, Dengue virus
DGSPC

SEQ ID NO: 923 - protein, 5 aa, Dengue virus
TEKDS

SEQ ID NO: 924 - protein, 5 aa, Dengue virus
EKDSP

SEQ ID NO: 925 - protein, 5 aa, Dengue virus
DSPVN

SEQ ID NO: 926 - protein, 5 aa, Dengue virus
EAEPP

SEQ ID NO: 927 - protein, 5 aa, Dengue virus
EPPFG

SEQ ID NO: 928 - protein, 5 aa, Dengue virus
PPFGD

SEQ ID NO: 929 - protein, 5 aa, Dengue virus
GSSIG

SEQ ID NO: 930 - protein, 5 aa, Dengue virus
SRSTS

SEQ ID NO: 931 - protein, 5 aa, Dengue virus
RSTSL

SEQ ID NO: 932 - protein, 5 aa, Dengue virus
KNKPT

SEQ ID NO: 933 - protein, 5 aa, Dengue virus
ISNTT

SEQ ID NO: 934 - protein, 5 aa, Dengue virus
SNTTT

SEQ ID NO: 935 - protein, 5 aa, Dengue virus
NTTTD

SEQ ID NO: 936 - protein, 5 aa, Dengue virus
TTTDS

SEQ ID NO: 937 - protein, 5 aa, Dengue virus
TTDSR

SEQ ID NO: 938 - protein, 5 aa, Dengue virus
SRCPT

SEQ ID NO: 939 - protein, 5 aa, Dengue virus
CPTQG

SEQ ID NO: 940 - protein, 5 aa, Dengue virus
PTQGE

SEQ ID NO: 941 - protein, 5 aa, Dengue virus
TQGEA

SEQ ID NO: 942 - protein, 5 aa, Dengue virus
QVGNE

SEQ ID NO: 943 - protein, 5 aa, Dengue virus
GNETT

SEQ ID NO: 944 - protein, 5 aa, Dengue virus
NETTE

SEQ ID NO: 945 - protein, 5 aa, Dengue virus
TEHGT

SEQ ID NO: 946 - protein, 5 aa, Dengue virus
APTSE

SEQ ID NO: 947 - protein, 5 aa, Dengue virus
SPRTG

SEQ ID NO: 948 - protein, 5 aa, Dengue virus
SGAST

SEQ ID NO: 949 - protein, 5 aa, Dengue virus
GASTS

SEQ ID NO: 950 - protein, 5 aa, Dengue virus
ASTSQ

SEQ ID NO: 951 - protein, 5 aa, Dengue virus
STSQE

SEQ ID NO: 952 - protein, 5 aa, Dengue virus
QTSGT

SEQ ID NO: 953 - protein, 5 aa, Dengue virus
SGTTT

SEQ ID NO: 954 - protein, 5 aa, Dengue virus
AETQH

SEQ ID NO: 955 - protein, 5 aa, Dengue virus
YEGTD

SEQ ID NO: 956 - protein, 5 aa, Dengue virus
EGTDA

SEQ ID NO: 957 - protein, 5 aa, Dengue virus
QDEKG

SEQ ID NO: 958 - protein, 5 aa, Dengue virus
DEKGV

SEQ ID NO: 959 - protein, 5 aa, Dengue virus
VTQNG

SEQ ID NO: 960 - protein, 5 aa, Dengue virus
KEKPV

SEQ ID NO: 961 - protein, 5 aa, Dengue virus
ETEPP

SEQ ID NO: 962 - protein, 5 aa, Dengue virus
EPPFG

SEQ ID NO: 963 - protein, 5 aa, Dengue virus
SRSTS

SEQ ID NO: 964 - protein, 5 aa, Dengue virus
RSTSL

SEQ ID NO: 965 - protein, 5 aa, Dengue virus
VTAET

SEQ ID NO: 966 - protein, 5 aa, Dengue virus
TAETQ

SEQ ID NO: 967 - protein, 5 aa, Dengue virus
ETQNS

SEQ ID NO: 968 - protein, 5 aa, Dengue virus
NTPEC

SEQ ID NO: 969 - protein, 5 aa, Dengue virus
TPECP

SEQ ID NO: 970 - protein, 5 aa, Dengue virus
CPSAS

SEQ ID NO: 971 - protein, 5 aa, Dengue virus
SQKNG

SEQ ID NO: 972 - protein, 5 aa, Dengue virus
QKNGS

SEQ ID NO: 973 - protein, 5 aa, Dengue virus
KNGSW

SEQ ID NO: 974 - protein, 5 aa, Dengue virus
GTRGP

SEQ ID NO: 975 - protein, 5 aa, Dengue virus
TRGPS

SEQ ID NO: 976 - protein, 5 aa, Dengue virus
SEKEE

SEQ ID NO: 977 - protein, 5 aa, Dengue virus
EKEEN

SEQ ID NO: 978 - protein, 5 aa, Dengue virus
FQPES

SEQ ID NO: 979 - protein, 5 aa, Dengue virus
PESPA

SEQ ID NO: 980 - protein, 5 aa, Dengue virus
ESPAR

SEQ ID NO: 981 - protein, 5 aa, Dengue virus
TPPVS

SEQ ID NO: 982 - protein, 5 aa, Dengue virus
GPDTS

SEQ ID NO: 983 - protein, 5 aa, Dengue virus
TSECP

SEQ ID NO: 984 - protein, 5 aa, Dengue virus
REGSS

SEQ ID NO: 985 - protein, 5 aa, Dengue virus
EGSSE

SEQ ID NO: 986 - protein, 5 aa, Dengue virus
GSSEV

SEQ ID NO: 987 - protein, 5 aa, Dengue virus
SSKNQ

SEQ ID NO: 988 - protein, 5 aa, Dengue virus
TTTAS

SEQ ID NO: 989 - protein, 5 aa, Dengue virus
TTASG

SEQ ID NO: 990 - protein, 5 aa, Dengue virus
TASGK

SEQ ID NO: 991 - protein, 5 aa, Dengue virus
LSEKE

SEQ ID NO: 992 - protein, 5 aa, Dengue virus
SEKEE

SEQ ID NO: 993 - protein, 5 aa, Dengue virus
EKEEN

SEQ ID NO: 994 - protein, 5 aa, Yellow fever virus
SPGRK

SEQ ID NO: 995 - protein, 5 aa, Yellow fever virus
PGRKN

SEQ ID NO: 996 - protein, 5 aa, Yellow fever virus
GRKNG

SEQ ID NO: 997 - protein, 5 aa, Yellow fever virus
KSRKE

SEQ ID NO: 998 - protein, 5 aa, Yellow fever virus
VNGKK

SEQ ID NO: 999 - protein, 5 aa, Yellow fever virus
NGKKS

SEQ ID NO: 1000 - protein, 5 aa, Yellow fever virus
GKKSA

SEQ ID NO: 1001 - protein, 5 aa, Yellow fever virus
SAHGS

SEQ ID NO: 1002 - protein, 5 aa, Yellow fever virus
AHGSP

SEQ ID NO: 1003 - protein, 5 aa, Yellow fever virus
GGPVS

SEQ ID NO: 1004 - protein, 5 aa, Yellow fever virus
VQTNG

SEQ ID NO: 1005 - protein, 5 aa, Yellow fever virus
GNCDG

SEQ ID NO: 1006 - protein, 5 aa, Yellow fever virus
DGRGK

SEQ ID NO: 1007 - protein, 5 aa, Yellow fever virus
GRGKS

SEQ ID NO: 1008 - protein, 5 aa, Yellow fever virus
RGKST

SEQ ID NO: 1009 - protein, 5 aa, Yellow fever virus
GKSTR

SEQ ID NO: 1010 - protein, 5 aa, Yellow fever virus
KSTRS

SEQ ID NO: 1011 - protein, 5 aa, Yellow fever virus
STRST

SEQ ID NO: 1012 - protein, 5 aa, Yellow fever virus
TRSTT

SEQ ID NO: 1013 - protein, 5 aa, Yellow fever virus
STTDS

SEQ ID NO: 1014 - protein, 5 aa, Yellow fever virus
TTDSG

SEQ ID NO: 1015 - protein, 5 aa, Yellow fever virus
TDSGK

SEQ ID NO: 1016 - protein, 5 aa, Yellow fever virus
DSGKV

SEQ ID NO: 1017 - protein, 5 aa, Yellow fever virus
RKTHE

SEQ ID NO: 1018 - protein, 5 aa, Yellow fever virus
PETPQ

SEQ ID NO: 1019 - protein, 5 aa, West Nile virus
ETPQG

SEQ ID NO: 1020 - protein, 5 aa, West Nile virus
APKRL

SEQ ID NO: 1021 - protein, 5 aa, West Nile virus
PETKE

SEQ ID NO: 1022 - protein, 5 aa, West Nile virus
CPTQN

SEQ ID NO: 1023 - protein, 5 aa, West Nile virus
RESNT

SEQ ID NO: 1024 - protein, 5 aa, West Nile virus
ESNTT

SEQ ID NO: 1025 - protein, 5 aa, West Nile virus
SNTTE

SEQ ID NO: 1026 - protein, 5 aa, West Nile virus
AGPRS

SEQ ID NO: 1027 - protein, 5 aa, West Nile virus
RSNHN

SEQ ID NO: 1028 - protein, 5 aa, West Nile virus
RGPAT

SEQ ID NO: 1029 - protein, 5 aa, West Nile virus
ATRTT

SEQ ID NO: 1030 - protein, 5 aa, West Nile virus
TRTTT

SEQ ID NO: 1031 - protein, 5 aa, West Nile virus
RTTTE

SEQ ID NO: 1032 - protein, 5 aa, West Nile virus
TTTES

SEQ ID NO: 1033 - protein, 5 aa, West Nile virus
TTESG

SEQ ID NO: 1034 - protein, 5 aa, West Nile virus
TESGK

SEQ ID NO: 1035 - protein, 5 aa, Dengue virus
DSPKR

SEQ ID NO: 1036 - protein, 5 aa, Dengue virus
GPDTP

SEQ ID NO: 1037 - protein, 5 aa, Dengue virus
TPECP

SEQ ID NO: 1038 - protein, 5 aa, Dengue virus
ECPDG

SEQ ID NO: 1039 - protein, 5 aa, Dengue virus
SEKNE

SEQ ID NO: 1040 - protein, 5 aa, Dengue virus
EKNET

SEQ ID NO: 1041 - protein, 5 aa, Dengue virus
NRGPS

SEQ ID NO: 1042 - protein, 5 aa, Dengue virus
VKEKE

SEQ ID NO: 1043 - protein, 5 aa, Dengue virus
KEKEE

SEQ ID NO: 1044 - protein, 5 aa, Dengue virus
EKEEN

SEQ ID NO: 1045 - protein, 5 aa, Dengue virus
FQPES

SEQ ID NO: 1046 - protein, 5 aa, Dengue virus
PESPS

SEQ ID NO: 1047 - protein, 5 aa, Dengue virus
ESPSK

SEQ ID NO: 1048 - protein, 5 aa, Dengue virus
SPSKL

SEQ ID NO: 1049 - protein, 5 aa, Dengue virus
GKRSL

SEQ ID NO: 1050 - protein, 5 aa, Dengue virus
STESH

SEQ ID NO: 1051 - protein, 5 aa, Dengue virus
TESHN

SEQ ID NO: 1052 - protein, 5 aa, Dengue virus
PETAE

SEQ ID NO: 1053 - protein, 5 aa, Dengue virus
PNTNR

SEQ ID NO: 1054 - protein, 5 aa, Dengue virus
NRGPS

SEQ ID NO: 1055 - protein, 5 aa, Dengue virus
TTTAS

SEQ ID NO: 1056 - protein, 5 aa, Dengue virus
TTASG

SEQ ID NO: 1057 - protein, 5 aa, Dengue virus
TASGK

SEQ ID NO: 1058 - protein, 15 aa, Plasmodium falciparum
SGEPQTQGEASSPSD

SEQ ID NO: 1059 - protein, 15 aa, Plasmodium falciparum
KELNSDKQSDKYISD

SEQ ID NO: 1060 - protein, 15 aa, Plasmodium falciparum
DEKKKKMTGKEEQII

SEQ ID NO: 1061 - protein, 15 aa, Plasmodium falciparum
EKKKKMTGKEEQIIV

SEQ ID NO: 1062 - protein, 15 aa, Plasmodium falciparum
GYINLETDENGYKKT

SEQ ID NO: 1063 - protein, 15 aa, Plasmodium falciparum
DSSLFTDENREEKKD

SEQ ID NO: 1064 - protein, 15 aa, Plasmodium falciparum
GGSNIRAEATGYGVV

SEQ ID NO: 1065 - protein, 15 aa, Plasmodium falciparum
RPTQDADTGTDDIDD

SEQ ID NO: 1066 - protein, 15 aa, Plasmodium falciparum
TITNDKGRLSQDEID

SEQ ID NO: 1067 - protein, 15 aa, Plasmodium falciparum
ELSGEGRLSSTGMYK

SEQ ID NO: 1068 - protein, 15 aa, Plasmodium falciparum
EDKGGAGTDGELSHN

SEQ ID NO: 1069 - protein, 15 aa, Plasmodium falciparum
SRGTPTDGPCEGKGD

SEQ ID NO: 1070 - protein, 15 aa, Plasmodium falciparum
LERLKDGPCKNDSEE

SEQ ID NO: 1071 - protein, 15 aa, Plasmodium falciparum
DTRDKTESTENKVLS

SEQ ID NO: 1072 - protein, 15 aa, Plasmodium falciparum
DELIEESTENLNSQH

SEQ ID NO: 1073 - protein, 15 aa, Plasmodium falciparum
TNIEWSTENSKTNTT

SEQ ID NO: 1074 - protein, 15 aa, Plasmodium falciparum
NIEWSTENSKTNTTN

SEQ ID NO: 1075 - protein, 15 aa, Plasmodium falciparum
KNEQVENSKMENGNK

SEQ ID NO: 1076 - protein, 15 aa, Plasmodium falciparum
FKGLSSKKETEEYVS

SEQ ID NO: 1077 - protein, 15 aa, Plasmodium falciparum
ICKGIEKKETRRWKR

SEQ ID NO: 1078 - protein, 15 aa, Plasmodium falciparum
DLSKQYHPDSNKNCK

SEQ ID NO: 1079 - protein, 15 aa, Plasmodium falciparum
NKNKEKTNNSKSDGS

SEQ ID NO: 1080 - protein, 15 aa, Plasmodium falciparum
RETYDKGKEAKSKRS

SEQ ID NO: 1081 - protein, 15 aa, Plasmodium falciparum
YAACDESEKNVEEHP

SEQ ID NO: 1082 - protein, 15 aa, Plasmodium falciparum
FENEKSEKNDNYINV

SEQ ID NO: 1083 - protein, 15 aa, Plasmodium falciparum
NKKNIEKNDTCNNNN

SEQ ID NO: 1084 - protein, 15 aa, Plasmodium falciparum
IDISLTNTREGQNYL

SEQ ID NO: 1085 - protein, 15 aa, Plasmodium falciparum
FMQERRTQMKEEKSN

SEQ ID NO: 1086 - protein, 15 aa, Plasmodium falciparum
KQNNNTQMKGKQNNN

SEQ ID NO: 1087 - protein, 15 aa, Plasmodium falciparum
NNNTNQMKGPPGQMN

SEQ ID NO: 1088 - protein, 15 aa, Plasmodium falciparum
PSGNNTTASGKNTPS

SEQ ID NO: 1089 - protein, 15 aa, Plasmodium falciparum
DIIYKIRPRKENKNV

SEQ ID NO: 1090 - protein, 15 aa, Plasmodium falciparum
EILHSKEPESDYVEA

SEQ ID NO: 1091 - protein, 15 aa, Plasmodium falciparum
SSSKMEPESNRYIKG

SEQ ID NO: 1092 - protein, 16 aa, Plasmodium falciparum
TNIEWSTENSKTNTTN

SEQ ID NO: 1093 - protein, 16 aa, Plasmodium falciparum
DEKKKKMTGKEEQIIV

SEQ ID NO: 1094 - DNA, 255 bp, Plasmodium falciparum
atggagacagacacactcctgctatgggtactgctgctctgggttccaggttccactggtgacacgcgttgccgcaagaacaagatcatcaacaagtacctgcacgagatggacatcaccaacatcgagtggtccaccgagaactccaagaccaacaccaccaactccgagtccaagaccaccaccacccgcgagaacaccatcgtgatcaaggagaagatcggcacccacgacgagaagaagaagaagtgctag

SEQ ID NO: 1095 - protein, 84 aa, Plasmodium falciparum
METDTLLLWVLLLWVPGSTGDTRCRKNKIINKYLHEMDITNIEWSTENSKTNTTNSESKTTTTRENTIVIKEKIGTHDEKKKKC

SEQ ID NO: 1096 - DNA, 273 bp, Plasmodium falciparum
atggagacagacacactcctgctatgggtactgctgctctgggttccaggttccactggtgacacgcgtcaccaccatcatcaccattgccgcaagaacaagatcatcaacaagtacctgcacgagatggacatcaccaacatcgagtggtccaccgagaactccaagaccaacaccaccaactccgagtccaagaccaccaccacccgcgagaacaccatcgtgatcaaggagaagatcggcacccacgacgagaagaagaagaagtgctag

SEQ ID NO: 1097 - protein, 90 aa, Plasmodium falciparum
METDTLLLWVLLLWVPGSTGDTRHHHHHHCRKNKIINKYLHEMDITNIEWSTENSKTNTTNSESKTTTTRENTIVIKEKIGTHDEKKKKC

SEQ ID NO: 1098 - DNA, 273 bp, Plasmodium falciparum
atggagacagacacactcctgctatgggtactgctgctctgggttccaggttccactggtgacacgcgttgccgcaagaacaagatcatcaacaagtacctgcacgagatggacatcaccaacatcgagtggtccaccgagaactccaagaccaacaccaccaactccgagtccaagaccaccaccacccgcgagaacaccatcgtgatcaaggagaagatcggcacccacgacgagaagaagaagaagtgccaccaccatcatcaccattag

SEQ ID NO: 1099 - protein, 90 aa, Plasmodium falciparum
METDTLLLWVLLLWVPGSTGDTRCRKNKIINKYLHEMDITNIEWSTENSKTNTTNSESKTTTTRENTIVIKEKIGTHDEKKKKCHHHHHH

SEQ ID NO: 1100 - DNA, 285 bp, Plasmodium falciparum
atggagacagacacactcctgctatgggtactgctgctctgggttccaggttccactggtgacacgcgttgccgcaagaacaagatcatcaacaagtacctgcacgagatggacatcaccaacatcgagtggtccaccgagaactccaagaccaacaccaccaactccgagtccaagaccaccaccacccgcgagaacaccatcgtgatcaagatgatgctggagctggacccccccttcggcgactcctacatcgtgatcggcgtgggcgagaagaagtgctag

SEQ ID NO: 1101 - protein, 94 aa, Plasmodium falciparum
METDTLLLWVLLLWVPGSTGDTRCRKNKIINKYLHEMDITNIEWSTENSKTNTTNSESKTTTTRENTIVIKMMLELDPPFGDSYIVIGVGEKKC

SEQ ID NO: 1102 - DNA, 303 bp, Plasmodium falciparum
atggagacagacacactcctgctatgggtactgctgctctgggttccaggttccactggtgacacgcgtcaccaccatcatcaccattgccgcaagaacaagatcatcaacaagtacctgcacgagatggacatcaccaacatcgagtggtccaccgagaactccaagaccaacaccaccaactccgagtccaagaccaccaccacccgcgagaacaccatcgtgatcaagatgatgctggagctggacccccccttcggcgactcctacatcgtgatcggcgtgggcgagaagaagtgctag

SEQ ID NO: 1103 - protein, 100 aa, Plasmodium falciparum
METDTLLLWVLLLWVPGSTGDTRHHHHHHCRKNKIINKYLHEMDITNIEWSTENSKTNTTNSESKTTTTRENTIVIKMMLELDPPFGDSYIVIGVGEKKC

SEQ ID NO: 1104 - DNA, 303 bp, Plasmodium falciparum
atggagacagacacactcctgctatgggtactgctgctctgggttccaggttccactggtgacacgcgttgccgcaagaacaagatcatcaacaagtacctgcacgagatggacatcaccaacatcgagtggtccaccgagaactccaagaccaacaccaccaactccgagtccaagaccaccaccacccgcgagaacaccatcgtgatcaagatgatgctggagctggacccccccttcggcgactcctacatcgtgatcggcgtgggcgagaagaagtgccaccaccatcatcaccattag

SEQ ID NO: 1105 - protein, 100 aa, Plasmodium falciparum
METDTLLLWVLLLWVPGSTGDTRCRKNKIINKYLHEMDITNIEWSTENSKTNTTNSESKTTTTRENTIVIKMMLELDPPFGDSYIVIGVGEKKCHHHHHH

SEQ ID NO: 1106 - protein, 5 aa, Dengue virus
SLRTT

SEQ ID NO: 1107 - protein, 5 aa, Dengue virus
ASRAW

SEQ ID NO: 1108 - protein, 5 aa, Dengue virus
IDGPS

SEQ ID NO: 1109 - protein, 5 aa, Dengue virus
KGKRA

SEQ ID NO: 1110 - protein, 5 aa, Dengue virus
IFTPE

SEQ ID NO: 1111 - protein, 5 aa, Dengue virus
TTVTG

SEQ ID NO: 1112 - protein, 5 aa, Dengue virus
SLAGP

SEQ ID NO: 1113 - protein, 5 aa, Dengue virus
SASRA

SEQ ID NO: 1114 - protein, 5 aa, Zika virus
PDSPR

SEQ ID NO: 1115 - protein, 5 aa, Dengue virus
AGKRS

SEQ ID NO: 1116 - protein, 5 aa, Dengue virus
LEQGK

SEQ ID NO: 1117 - protein, 5 aa, Dengue virus
KNSTF

SEQ ID NO: 1118 - protein, 5 aa, Zika virus
SLAGP

SEQ ID NO: 1119 - protein, 5 aa, Zika virus
EECPG

SEQ ID NO: 1120 - protein, 5 aa, Zika virus
EETCG

SEQ ID NO: 1121 - protein, 5 aa, Zika virus
VEETC

SEQ ID NO: 1122 - protein, 5 aa, Usutu virus
SSGRL

SEQ ID NO: 1123 - protein, 5 aa, Usutu virus
LAGPR

SEQ ID NO: 1124 - protein, 5 aa, Usutu virus
RTTTS

SEQ ID NO: 1125 - protein, 5 aa, Usutu virus
TTTSS

SEQ ID NO: 1126 - protein, 1137 aa, Dengue virus
ATGGGCTCCACCTCCCTGTCCGTGACCCTGGTGCTGGTGGGCATCGTGACCCTGTACCTGGGCGTGATGGTGCAGGCCGACTCCGGCTGCGTGGTGTCCTGGAAGAACAAGGAGCTGAAGTGCGGCTCCGGCATCTTCATCACCGACAACGTGCACACCTGGACCGAGCAGTACAAGTTCCAGCCCGAGTCCCCCTCCAAGCTGGCCTCCGCCATCCAGAAGGCCCACGAGGAGGGCATCTGCGGCATCCGCTCCGTGACCCGCCTGGAGAACCTGATGTGGAAGCAGATCACCCCCGAGCTGAACCACATCCTGTCCGAGAACGAGGTGAAGCTGACCATCATGACCGGCGACATCAAGGGCATCATGCAGGCCGGCAAGCGCTCCCTGCGCCCCCAGCCCACCGAGCTGAAGTACTCCTGGAAGACCTGGGGCAAGGCCAAGATGCTGTCCACCGAGTCCCACAACCAGACCTTCCTGATCGACGGCCCCGAGACCGCCGAGTGCCCCAACACCAACCGCGCCTGGAACTCCCTGGAGGTGGAGGACTACGGCTTCGGCGTGTTCACCACCAACATCTGGCTGAAGCTGAAGGAGAAGCAGGACGTGTTCTGCGACTCCAAGCTGATGTCCGCCGCCATCAAGGACAACCGCGCCGTGCACGCCGACATGGGCTACTGGATCGAGTCCGCCCTGAACGACACCTGGAAGATCGAGAAGGCCTCCTTCATCGAGGTGAAGAACTGCCACTGGCCCAAGTCCCACACCCTGTGGTCCAACGGCGTGCTGGAGTCCGAGATGATCATCCCCAAGAACCTGGCCGGCCCCGTGTCCCAGCACAACTACCGCCCCGGCTACCACACCCAGATCACCGGCCCCTGGCACCTGGGCAAGCTGGAGATGGACTTCGACTTCTGCGACGGCACCACCGTGGTGGTGACCGAGGACTGCGGCAACCGCGGCCCCTCCCTGCGCACCACCACCGCCTCCGGCAAGCTGATCACCGAGTGGTGCTGCCGCTCCTGCACCCTGCCCCCCCTGCGCTACCGCGGCGAGGACGGCTGCTGGTACGGCATGGAGATCCGCCCCCTGAAGGAGAAGGAGGAGAACCTGGTGAACTCCCTGGTGACCGCCTAG

SEQ ID NO: 1127 - protein, 378 aa, Dengue virus
MGSTSLSVTLVLVGIVTLYLGVMVQADSGCVVSWKNKELKCGSGIFITDNVHTWTEQYKFQPESPSKLASAIQKAHEEGICGIRSVTRLENLMWKQITPELNHILSENEVKLTIMTGDIKGIMQAGKRSLRPQPTELKYSWKTWGKAKMLSTESHNQTFLIDGPETAECPNTNRAWNSLEVEDYGFGVFTTNIWLKLKEKQDVFCDSKLMSAAIKDNRAVHADMGYWIESALNDTWKIEKASFIEVKNCHWPKSHTLWSNGVLESEMIIPKNLAGPVSQHNYRPGYHTQITGPWHLGKLEMDFDFCDGTTVVVTEDCGNRGPSLRTTTASGKLITEWCCRSCTLPPLRYRGEDGCWYGMEIRPLKEKEENLVNSLVTA

SEQ ID NO: 1128 - protein, 1137 aa, Dengue virus
ATGGGCAACGGCTCCATCTCCCTGATGTGCCTGGCCCTGGGCGGCGTGCTGATCTTCCTGTCCACCGCCGTGTCCGCCGACGTGGGCTGCTCAGTGGATTTCAGCAAAAAGGAGACCAGATGTGGTACGGGTGTGTTTGTGTACAATGATGTGGAGGCTTGGCGCGATCGATACAAGTACCACCCTGATAGCCCCAGGAGGCTGGCTGCGGCAGTGAAACAAGCGTGGGAGGATGGTATCTGCGGCATTTCCAGTGTCAGTAGGATGGAAAATATAATGTGGCGAAGCGTGGAAGGGGAACTGAATGCAATACTGGAGGAAAACGGGGTCCAACTCACAGTGGTGGTGGGTTCTGTGAAAAATCCGATGTGGAGAGGGCCTCAACGATTGCCTGTCCCGGTAAATGAGCTCCCACACGGTTGGAAGGCATGGGGCAAGTCTTATTTTGTAAGGGCAGCTAAAACAAACAACAGTTTTGTCGTTGATGGGGACACGCTGAAGGAGTGCCCGTTGAAGCACAGAGCCTGGAACAGCTTTTTGGTGGAAGACCATGGATTTGGTGTGTTTCATACGTCAGTATGGCTGAAGGTACGGGAGGATTACAGCCTCGAATGCGATCCCGCTGTTATCGGTACCGCCGTGAAGGGCAAGGAAGCGGTGCACTCCGATTTGGGTTATTGGATTGAAAGCGAGAAAAATGATACTTGGAGGTTGAAACGCGCACATCTCATTGAAATGAAAACTTGCGAGTGGCCTAAATCCCATACTCTCTGGACGGACGGCATTGAGGAAAGCGATCTCATCATTCCCAAATCACTTGCCGGGCCACTTTCTCACCACAACACGAGAGAAGGCTATAGGACTCAGATGAAAGGGCCGTGGCACAGTGAGGAACTCGAAATCCGGTTCGAGGAGTGCCCAGGGACTAAAGTTCATGTTGAGGAGACCTGCGGGACTAGGGGGCCGTCTCTCAGGAGCACGACTGCATCAGGGAGGGTGATCGAGGAATGGTGTTGCCGAGAGTGTACGATGCCTCCGCTGTCTTTCAGGGCAAAAGACGGCTGCTGGTATGGTATGGAGATTCGACCGCGAAAGGAGCCGGAGTCCAACTTGGTCAGGTCAATGGTAACCGCGTAG

SEQ ID NO: 1129 - protein, 378 aa, Zika virus
MGNGSISLMCLALGGVLIFLSTAVSADVGCSVDFSKKETRCGTGVFVYNDVEAWRDRYKYHPDSPRRLAAAVKQAWEDGICGISSVSRMENIMWRSVEGELNAILEENGVQLTVVVGSVKNPMWRGPQRLPVPVNELPHGWKAWGKSYFVRAAKTNNSFVVDGDTLKECPLKHRAWNSFLVEDHGFGVFHTSVWLKVREDYSLECDPAVIGTAVKGKEAVHSDLGYWIESEKNDTWRLKRAHLIEMKTCEWPKSHTLWTDGIEESDLIIPKSLAGPLSHHNTREGYRTQMKGPWHSEELEIRFEECPGTKVHVEETCGTRGPSLRSTTASGRVIEEWCCRECTMPPLSFRAKDGCWYGMEIRPRKEPESNLVRSMVTA

SEQ ID NO: 1130 - protein, 1134 aa, Usutu virus
ATGGGCCGCTCCATCGCCCTGGTGATGCTGGCCACCGGCGGCGTGCTGCTGTTCCTGGCCACCAACGTGCACGCCGACTCCGGCTGCGCCATCGACGTGGGCCGCCGCGAGCTGCGCTGCGGCCAGGGCATCTTCATCCACAACGACGTGGAGGCCTGGGTGGACCGCTACAAGTTCATGCCCGGCACCCCCAAGCAGCTGGCCAAGGTGATCGAGCAGGCCCACGCCAAGGGCATCTGCGGCCTGCGCTCCGTGTCCCGCCTGGAGCACGTGATGTGGGAGAACATCCGCGACGAGCTGAACACCCTGCTGCGCGAGAACGCCGTGGACCTGTCCGTGGTGGTGGAGAAGCCCAAGGGCATGTACAAGTCCGCCCCCCAGCGCCTGGCCCTGACCTCCGAGGAGTTCGAGATCGGCTGGAAGGCCTGGGGCAAGTCCCTGGTGTTCGCCCCCGAGCTGGCCAACCACACCTTCGTGGTGGACGGCCCCGAGACCAAGGAGTGCCCCGACGTGAAGCGCGCCTGGAACTCCCTGGAGATCGAGGACTTCGGCTTCGGCATCATGTCCACCCGCGTGTGGCTGAAGGTGCGCGAGCACAACACCACCGACTGCGACTCCTCCATCATCGGCACCGCCGTGAAGGGCGACATCGCCGTGCACTCCGACCTGTCCTACTGGATCGAGTCCCACAAGAACACCACCTGGCGCCTGGAGCGCGCCGTGTTCGGCGAGATCAAGTCCTGCACCTGGCCCGAGACCCACACCCTGTGGTCCGACGGCGTGGTGGAGTCCGACCTGGTGGTGCCCGTGACCCTGGCCGGCCCCAAGTCCAACCACAACCGCCGCGAGGGCTACAAGGTGCAGTCCCAGGGCCCCTGGGACGAGGAGGACATCGTGCTGGACTTCGACTACTGCCCCGGCACCACCGTGACCATCACCGAGGCCTGCGGCAAGCGCGGCCCCTCCATCCGCACCACCACCTCCTCCGGCCGCCTGGTGACCGACTGGTGCTGCCGCTCCTGCACCCTGCCCCCCCTGCGCTACCGCACCAAGAACGGCTGCTGGTACGGCATGGAGATCCGCCCCATGAAGCACGACGAGACCACCCTGGTGAAGTCCTCCGTGTCCGCCTAG

SEQ ID NO: 1131 - protein, 377 aa, Usutu virus
MGRSIALVMLATGGVLLFLATNVHADSGCAIDVGRRELRCGQGIFIHNDVEAWVDRYKFMPGTPKQLAKVIEQAHAKGICGLRSVSRLEHVMWENIRDELNTLLRENAVDLSVVVEKPKGMYKSAPQRLALTSEEFEIGWKAWGKSLVFAPELANHTFVVDGPETKECPDVKRAWNSLEIEDFGFGIMSTRVWLKVREHNTTDCDSSIIGTAVKGDIAVHSDLSYWIESHKNTTWRLERAVFGEIKSCTWPETHTLWSDGVVESDLVVPVTLAGPKSNHNRREGYKVQSQGPWDEEDIVLDFDYCPGTTVTITEACGKRGPSIRTTTSSGRLVTDWCCRSCTLPPLRYRTKNGCWYGMEIRPMKHDETTLVKSSVSA

SEQ ID NO: 1132 - protein, 1860 aa, Dengue virus
ATGGAGACAGACACACTCCTGCTATGGGTACTGCTGCTCTGGGTTCCAGGTTCCACTGGTGACACGCGTTCCGGCTGCGTGGTGTCCTGGAAGAACAAGGAGCTGAAGTGCGGCTCCGGCATCTTCATCACCGACAACGTGCACACCTGGACCGAGCAGTACAAGTTCCAGCCCGAGTCCCCCTCCAAGCTGGCCTCCGCCATCCAGAAGGCCCACGAGGAGGGCATCTGCGGCATCCGCTCCGTGACCCGCCTGGAGAACCTGATGTGGAAGCAGATCACCCCCGAGCTGAACCACATCCTGTCCGAGAACGAGGTGAAGCTGACCATCATGACCGGCGACATCAAGGGCATCATGCAGGCCGGCAAGCGCTCCCTGCGCCCCCAGCCCACCGAGCTGAAGTACTCCTGGAAGACCTGGGGCAAGGCCAAGATGCTGTCCACCGAGTCCCACAACCAGACCTTCCTGATCGACGGCCCCGAGACCGCCGAGTGCCCCAACACCAACCGCGCCTGGAACTCCCTGGAGGTGGAGGACTACGGCTTCGGCGTGTTCACCACCAACATCTGGCTGAAGCTGAAGGAGAAGCAGGACGTGTTCTGCGACTCCAAGCTGATGTCCGCCGCCATCAAGGACAACCGCGCCGTGCACGCCGACATGGGCTACTGGATCGAGTCCGCCCTGAACGACACCTGGAAGATCGAGAAGGCCTCCTTCATCGAGGTGAAGAACTGCCACTGGCCCAAGTCCCACACCCTGTGGTCCAACGGCGTGCTGGAGTCCGAGATGATCATCCCCAAGAACCTGGCCGGCCCCGTGTCCCAGCACAACTACCGCCCCGGCTACCACACCCAGATCACCGGCCCCTGGCACCTGGGCAAGCTGGAGATGGACTTCGACTTCTGCGACGGCACCACCGTGGTGGTGACCGAGGACTGCGGCAACCGCGGCCCCTCCCTGCGCACCACCACCGCCTCCGGCAAGCTGATCACCGAGTGGTGCTGCCGCTCCTGCACCCTGCCCCCCCTGCGCTACCGCGGCGAGGACGGCTGCTGGTACGGCATGGAGATCCGCCCCCTGAAGGAGAAGGAGGAGAACCTGGTGAACTCCCTGGTGACCGCCGGCCACGGCGACTACAAGGACGACGACGACAAGGTCGACGAGCCCAAATCTTGTGACAAAACTCACACATGCCCACCGTGCCCAGCACCTGAACTCCTGGGGGGACCGTCAGTCTTCCTCTTCCCCCCAAAACCCAAGGACACCCTCATGATCTCCCGGACCCCTGAGGTCACATGCGTGGTGGTGGACGTGAGCCACGAAGACCCTGAGGTCAAGTTCAACTGGTACGTGGACGGCGTGGAGGTGCATAATGCCAAGACAAAGCCGCGGGAGGAGCAGTACAACAGCACGTACCGTGTGGTCAGCGTCCTCACCGTCCTGCACCAGGACTGGCTGAATGGCAAGGAGTACAAGTGCAAGGTCTCCAACAAAGCCCTCCCAGCCCCCATCGAGAAAACCATCTCCAAAGCCAAAGGGCAGCCCCGAGAACCACAGGTGTACACCCTGCCCCCATCCCGGGAGGAGATGACCAAGAACCAGGTCAGCCTGACCTGCCTGGTCAAAGGCTTCTATCCCAGCGACATCGCCGTGGAGTGGGAGAGCAATGGGCAGCCGGAGAACAACTACAAGACCACGCCTCCCGTGCTGGACTCCGACGGCTCCTTCTTCCTCTATAGCAAGCTCACCGTGGACAAGAGCAGGTGGCAGCAGGGGAACGTCTTCTCATGCTCCGTGATGCATGAGGCTCTGCACAACCACTACACGCAGAAGAGCCTCTCCCTGTCTCCGGGTAAATGA

SEQ ID NO: 1133 - protein, 619 aa, Dengue virus
METDTLLLWVLLLWVPGSTGDTRSGCVVSWKNKELKCGSGIFITDNVHTWTEQYKFQPESPSKLASAIQKAHEEGICGIRSVTRLENLMWKQITPELNHILSENEVKLTIMTGDIKGIMQAGKRSLRPQPTELKYSWKTWGKAKMLSTESHNQTFLIDGPETAECPNTNRAWNSLEVEDYGFGVFTTNIWLKLKEKQDVFCDSKLMSAAIKDNRAVHADMGYWIESALNDTWKIEKASFIEVKNCHWPKSHTLWSNGVLESEMIIPKNLAGPVSQHNYRPGYHTQITGPWHLGKLEMDFDFCDGTTVVVTEDCGNRGPSLRTTTASGKLITEWCCRSCTLPPLRYRGEDGCWYGMEIRPLKEKEENLVNSLVTAGHGDYKDDDDKVDEPKSCDKTHTCPPCPAPELLGGPSVFLFPPKPKDTLMISRTPEVTCVVVDVSHEDPEVKFNWYVDGVEVHNAKTKPREEQYNSTYRVVSVLTVLHQDWLNGKEYKCKVSNKALPAPIEKTISKAKGQPREPQVYTLPPSREEMTKNQVSLTCLVKGFYPSDIAVEWESNGQPENNYKTTPPVLDSDGSFFLYSKLTVDKSRWQQGNVFSCSVMHEALHNHYTQKSLSLSPGK

SEQ ID NO: 1134 - protein, 1854 aa, Zika virus
ATGGAGACAGACACACTCCTGCTATGGGTACTGCTGCTCTGGGTTCCAGGTTCCACTGGTGACACGCGTGGCTGCTCCGTGGACTTCTCCAAGAAGGAGACCCGCTGCGGCACCGGCGTGTTCGTGTACAACGACGTGGAGGCCTGGCGCGACCGCTACAAGTACCACCCCGACTCCCCCCGCCGCCTGGCCGCCGCCGTGAAGCAGGCCTGGGAGGACGGCATCTGCGGCATCTCCTCCGTGTCCCGCATGGAGAACATCATGTGGCGCTCCGTGGAGGGCGAGCTGAACGCCATCCTGGAGGAGAACGGCGTGCAGCTGACCGTGGTGGTGGGCTCCGTGAAGAACCCCATGTGGCGCGGCCCCCAGCGCCTGCCCGTGCCCGTGAACGAGCTGCCCCACGGCTGGAAGGCCTGGGGCAAGTCCCACTTCGTGCGCGCCGCCAAGACCAACAACTCCTTCGTGGTGGACGGCGACACCCTGAAGGAGTGCCCCCTGAAGCACCGCGCCTGGAACTCCTTCCTGGTGGAGGACCACGGCTTCGGCGTGTTCCACACCTCCGTGTGGCTGAAGGTGCGCGAGGACTACTCCCTGGAGTGCGACCCCGCCGTGATCGGCACCGCCGTGAAGGGCAAGGAGGCCGTGCACTCCGACCTGGGCTACTGGATCGAGTCCGAGAAGAACGACACCTGGCGCCTGAAGCGCGCCCACCTGATCGAGATGAAGACCTGCGAGTGGCCCAAGTCCCACACCCTGTGGACCGACGGCATCGAGGAGTCCGACCTGATCATCCCCAAGTCCCTGGCCGGCCCCCTGTCCCACCACAACACCCGCGAGGGCTACCGCACCCAGATGAAGGGCCCCTGGCACTCCGAGGAGCTGGAGATCCGCTTCGAGGAGTGCCCCGGCACCAAGGTGCACGTGGAGGAGACCTGCGGCACCCGCGGCCCCTCCCTGCGCTCCACCACCGCCTCCGGCCGCGTGATCGAGGAGTGGTGCTGCCGCGAGTGCACCATGCCCCCCCTGTCCTTCCGCGCCAAGGACGGCTGCTGGTACGGCATGGAGATCCGCCCCCGCAAGGAGCCCGAGTCCAACCTGGTGCGCTCCATGGTGACCGCCGGCTCCGACTACAAGGACGACGACGACAAGGTCGACGAGCCCAAATCTTGTGACAAAACTCACACATGCCCACCGTGCCCAGCACCTGAACTCCTGGGGGGACCGTCAGTCTTCCTCTTCCCCCCAAAACCCAAGGACACCCTCATGATCTCCCGGACCCCTGAGGTCACATGCGTGGTGGTGGACGTGAGCCACGAAGACCCTGAGGTCAAGTTCAACTGGTACGTGGACGGCGTGGAGGTGCATAATGCCAAGACAAAGCCGCGGGAGGAGCAGTACAACAGCACGTACCGTGTGGTCAGCGTCCTCACCGTCCTGCACCAGGACTGGCTGAATGGCAAGGAGTACAAGTGCAAGGTCTCCAACAAAGCCCTCCCAGCCCCCATCGAGAAAACCATCTCCAAAGCCAAAGGGCAGCCCCGAGAACCACAGGTGTACACCCTGCCCCCATCCCGGGAGGAGATGACCAAGAACCAGGTCAGCCTGACCTGCCTGGTCAAAGGCTTCTATCCCAGCGACATCGCCGTGGAGTGGGAGAGCAATGGGCAGCCGGAGAACAACTACAAGACCACGCCTCCCGTGCTGGACTCCGACGGCTCCTTCTTCCTCTATAGCAAGCTCACCGTGGACAAGAGCAGGTGGCAGCAGGGGAACGTCTTCTCATGCTCCGTGATGCATGAGGCTCTGCACAACCACTACACGCAGAAGAGCCTCTCCCTGTCTCCGGGTAAATGA

SEQ ID NO: 1135 - protein, 617 aa, Zika virus
METDTLLLWVLLLWVPGSTGDTRGCSVDFSKKETRCGTGVFVYNDVEAWRDRYKYHPDSPRRLAAAVKQAWEDGICGISSVSRMENIMWRSVEGELNAILEENGVQLTVVVGSVKNPMWRGPQRLPVPVNELPHGWKAWGKSHFVRAAKTNNSFVVDGDTLKECPLKHRAWNSFLVEDHGFGVFHTSVWLKVREDYSLECDPAVIGTAVKGKEAVHSDLGYWIESEKNDTWRLKRAHLIEMKTCEWPKSHTLWTDGIEESDLIIPKSLAGPLSHHNTREGYRTQMKGPWHSEELEIRFEECPGTKVHVEETCGTRGPSLRSTTASGRVIEEWCCRECTMPPLSFRAKDGCWYGMEIRPRKEPESNLVRSMVTAGSDYKDDDDKVDEPKSCDKTHTCPPCPAPELLGGPSVFLFPPKPKDTLMISRTPEVTCVVVDVSHEDPEVKFNWYVDGVEVHNAKTKPREEQYNSTYRVVSVLTVLHQDWLNGKEYKCKVSNKALPAPIEKTISKAKGQPREPQVYTLPPSREEMTKNQVSLTCLVKGFYPSDIAVEWESNGQPENNYKTTPPVLDSDGSFFLYSKLTVDKSRWQQGNVFSCSVMHEALHNHYTQKSLSLSPGK

SEQ ID NO: 1136 - protein, 1854 aa, Usutu virus
ATGGAGACAGACACACTCCTGCTATGGGTACTGCTGCTCTGGGTTCCAGGTTCCACTGGTGACACGCGTGACTCCGGCTGCGCCATCGACGTGGGCCGCCGCGAGCTGCGCTGCGGCCAGGGCATCTTCATCCACAACGACGTGGAGGCCTGGGTGGACCGCTACAAGTTCATGCCCGGCACCCCCAAGCAGCTGGCCAAGGTGATCGAGCAGGCCCACGCCAAGGGCATCTGCGGCCTGCGCTCCGTGTCCCGCCTGGAGCACGTGATGTGGGAGAACATCCGCGACGAGCTGAACACCCTGCTGCGCGAGAACGCCGTGGACCTGTCCGTGGTGGTGGAGAAGCCCAAGGGCATGTACAAGTCCGCCCCCCAGCGCCTGGCCCTGACCTCCGAGGAGTTCGAGATCGGCTGGAAGGCCTGGGGCAAGTCCCTGGTGTTCGCCCCCGAGCTGGCCAACCACACCTTCGTGGTGGACGGCCCCGAGACCAAGGAGTGCCCCGACGTGAAGCGCGCCTGGAACTCCCTGGAGATCGAGGACTTCGGCTTCGGCATCATGTCCACCCGCGTGTGGCTGAAGGTGCGCGAGCACAACACCACCGACTGCGACTCCTCCATCATCGGCACCGCCGTGAAGGGCGACATCGCCGTGCACTCCGACCTGTCCTACTGGATCGAGTCCCACAAGAACACCACCTGGCGCCTGGAGCGCGCCGTGTTCGGCGAGATCAAGTCCTGCACCTGGCCCGAGACCCACACCCTGTGGTCCGACGGCGTGGTGGAGTCCGACCTGGTGGTGCCCGTGACCCTGGCCGGCCCCCGCTCCAACCACAACCGCCGCGAGGGCTACAAGGTGCAGTCCCAGGGCCCCTGGGACGAGGAGGACATCGTGCTGGACTTCGACTACTGCCCCGGCACCACCGTGACCATCACCGAGGCCTGCGGCAAGCGCGGCCCCTCCATCCGCACCACCACCTCCTCCGGCCGCCTGGTGACCGACTGGTGCTGCCGCTCCTGCACCCTGCCCCCCCTGCGCTACCGCACCAAGAACGGCTGCTGGTACGGCATGGAGATCCGCCCCATGAAGCACGACGAGACCACCCTGGTGAAGTCCTCCGTGTCCGCCGACTACAAGGACGACGACGACAAGGTCGACGAGCCCAAATCTTGTGACAAAACTCACACATGCCCACCGTGCCCAGCACCTGAACTCCTGGGGGGACCGTCAGTCTTCCTCTTCCCCCCAAAACCCAAGGACACCCTCATGATCTCCCGGACCCCTGAGGTCACATGCGTGGTGGTGGACGTGAGCCACGAAGACCCTGAGGTCAAGTTCAACTGGTACGTGGACGGCGTGGAGGTGCATAATGCCAAGACAAAGCCGCGGGAGGAGCAGTACAACAGCACGTACCGTGTGGTCAGCGTCCTCACCGTCCTGCACCAGGACTGGCTGAATGGCAAGGAGTACAAGTGCAAGGTCTCCAACAAAGCCCTCCCAGCCCCCATCGAGAAAACCATCTCCAAAGCCAAAGGGCAGCCCCGAGAACCACAGGTGTACACCCTGCCCCCATCCCGGGAGGAGATGACCAAGAACCAGGTCAGCCTGACCTGCCTGGTCAAAGGCTTCTATCCCAGCGACATCGCCGTGGAGTGGGAGAGCAATGGGCAGCCGGAGAACAACTACAAGACCACGCCTCCCGTGCTGGACTCCGACGGCTCCTTCTTCCTCTATAGCAAGCTCACCGTGGACAAGAGCAGGTGGCAGCAGGGGAACGTCTTCTCATGCTCCGTGATGCATGAGGCTCTGCACAACCACTACACGCAGAAGAGCCTCTCCCTGTCTCCGGGTAAATGA

SEQ ID NO: 1137 - protein, 617 aa, Usutu virus
METDTLLLWVLLLWVPGSTGDTRDSGCAIDVGRRELRCGQGIFIHNDVEAWVDRYKFMPGTPKQLAKVIEQAHAKGICGLRSVSRLEHVMWENIRDELNTLLRENAVDLSVVVEKPKGMYKSAPQRLALTSEEFEIGWKAWGKSLVFAPELANHTFVVDGPETKECPDVKRAWNSLEIEDFGFGIMSTRVWLKVREHNTTDCDSSIIGTAVKGDIAVHSDLSYWIESHKNTTWRLERAVFGEIKSCTWPETHTLWSDGVVESDLVVPVTLAGPRSNHNRREGYKVQSQGPWDEEDIVLDFDYCPGTTVTITEACGKRGPSIRTTTSSGRLVTDWCCRSCTLPPLRYRTKNGCWYGMEIRPMKHDETTLVKSSVSADYKDDDDKVDEPKSCDKTHTCPPCPAPELLGGPSVFLFPPKPKDTLMISRTPEVTCVVVDVSHEDPEVKFNWYVDGVEVHNAKTKPREEQYNSTYRVVSVLTVLHQDWLNGKEYKCKVSNKALPAPIEKTISKAKGQPREPQVYTLPPSREEMTKNQVSLTCLVKGFYPSDIAVEWESNGQPENNYKTTPPVLDSDGSFFLYSKLTVDKSRWQQGNVFSCSVMHEALHNHYTQKSLSLSPGK

SEQ ID NO: 1138 - protein, 22 aa, Yellow fever virus
CDGRGKSTRSTTDSGKVIPEWC

SEQ ID NO: 1139 - protein, 22 aa, Dengue virus
CGNRGPSLRTTTVTGKIIHEWC

SEQ ID NO: 1140 - protein, 22 aa, Dengue virus
CGNRGPSLRTTTASGKLITEWC

SEQ ID NO: 1141 - protein, 22 aa, Dengue virus
CGTRGPSLRTTTVSGKLIHEWC

SEQ ID NO: 1142 - protein, 22 aa, Dengue virus
CDHRGPSLRTTTASGKLVTQWC

SEQ ID NO: 1143 - protein, 22 aa, Zika virus
CGTRGPSLRSTTASGRVIEEWC

SEQ ID NO: 1144 - protein, 22 aa, West Nile virus
CEHRGPAARTTTESGKLITDWC

SEQ ID NO: 1145 - protein, 22 aa, Japanese encephalitis virus
CSKRGPSVRTTTDSGKLITDWC

SEQ ID NO: 1146 - protein, 22 aa, Tick-borne meningoencephalitis virus
CDKRGASVRSTTESGKVIPEWC

SEQ ID NO: 1147 - protein, 22 aa, Saint Louis encephalitis virus
CGNRGASLRTTTASGKLVTDWC

SEQ ID NO: 1148 - protein, 22 aa, Usutu virus
CGKRGPSIRTTTSSGRLVTDWC

SEQ ID NO: 1149 - protein, 22 aa, Artificial sequence
  Synthetic
CGTRGPSLRMTTVMGRVIEEWC

SEQ ID NO: 1150 - DNA, 810 bp, Artificial sequence
  Synthetic
atgtgtggcacgcgagggccgagtcttagatcaaccaccgcatctggccgggtcatagaggaatggtgcgtcgacggtggtggcggttcaatggtgagcaagggcgaggagctgttcaccggggtggtgcccatcctggtcgagctggacggcgacgtaaacggccacaagttcagcgtgtccggcgagggcgagggcgatgccacctacggcaagctgaccctgaagttcatctgcaccaccggcaagctgcccgtgccctggcccaccctcgtgaccaccctgacctacggcgtgcagtgcttcagccgctaccccgaccacatgaagcagcacgacttcttcaagtccgccatgcccgaaggctacgtccaggagcgcaccatcttcttcaaggacgacggcaactacaagacccgcgccgaggtgaagttcgagggcgacaccctggtgaaccgcatcgagctgaagggcatcgacttcaaggaggacggcaacatcctggggcacaagctggagtacaactacaacagccacaacgtctatatcatggccgacaagcagaagaacggcatcaaggtgaacttcaagatccgccacaacatcgaggacggcagcgtgcagctcgccgaccactaccagcagaacacccccatcggcgacggccccgtgctgctgcccgacaaccactacctgagcacccagtccgccctgagcaaagaccccaacgagaagcgcgatcacatggtcctgctggagttcgtgaccgccgccgggatcactctcggcatggacgagctgtacaagtag

SEQ ID NO: 1151 - protein, 269 aa, Artificial sequence
  Synthetic
MCGTRGPSLRSTTASGRVIEEWCVDGGGGSMVSKGEELFTGVVPILVELDGDVNGHKFSVSGEGEGDATYGKLTLKFICTTGKLPVPWPTLVTTLTYGVQCFSRYPDHMKQHDFFKSAMPEGYVQERTIFFKDDGNYKTRAEVKFEGDTLVNRIELKGIDFKEDGNILGHKLEYNYNSHNVYIMADKQKNGIKVNFKIRHNIEDGSVQLADHYQQNTPIGDGPVLLPDNHYLSTQSALSKDPNEKRDHMVLLEFVTAAGITLGMDELYK

SEQ ID NO: 1152 - DNA, 810 bp, Artificial sequence
  Synthetic
atgtgcgggacacgcgggccatccttgaggatgactacggtcatgggacgagttatagaagaatggtgtgtcgacggtggtggcggttcaatggtgagcaagggcgaggagctgttcaccggggtggtgcccatcctggtcgagctggacggcgacgtaaacggccacaagttcagcgtgtccggcgagggcgagggcgatgccacctacggcaagctgaccctgaagttcatctgcaccaccggcaagctgcccgtgccctggcccaccctcgtgaccaccctgacctacggcgtgcagtgcttcagccgctaccccgaccacatgaagcagcacgacttcttcaagtccgccatgcccgaaggctacgtccaggagcgcaccatcttcttcaaggacgacggcaactacaagacccgcgccgaggtgaagttcgagggcgacaccctggtgaaccgcatcgagctgaagggcatcgacttcaaggaggacggcaacatcctggggcacaagctggagtacaactacaacagccacaacgtctatatcatggccgacaagcagaagaacggcatcaaggtgaacttcaagatccgccacaacatcgaggacggcagcgtgcagctcgccgaccactaccagcagaacacccccatcggcgacggccccgtgctgctgcccgacaaccactacctgagcacccagtccgccctgagcaaagaccccaacgagaagcgcgatcacatggtcctgctggagttcgtgaccgccgccgggatcactctcggcatggacgagctgtacaagtag

SEQ ID NO: 1153 - protein, 269 aa, Artificial sequence
  Synthetic
MCGTRGPSLRMTTVMGRVIEEWCVDGGGGSMVSKGEELFTGVVPILVELDGDVNGHKFSVSGEGEGDATYGKLTLKFICTTGKLPVPWPTLVTTLTYGVQCFSRYPDHMKQHDFFKSAMPEGYVQERTIFFKDDGNYKTRAEVKFEGDTLVNRIELKGIDFKEDGNILGHKLEYNYNSHNVYIMADKQKNGIKVNFKIRHNIEDGSVQLADHYQQNTPIGDGPVLLPDNHYLSTQSALSKDPNEKRDHMVLLEFVTAAGITLGMDELYK

SEQ ID NO: 1154 - DNA, 810 bp, Artificial sequence
  Synthetic
atgtgtgatggtcgcggaaagagcactagaagcaccaccgactctgggaaagttatacccgaatggtgcgtcgacggtggtggcggttcaatggtgagcaagggcgaggagctgttcaccggggtggtgcccatcctggtcgagctggacggcgacgtaaacggccacaagttcagcgtgtccggcgagggcgagggcgatgccacctacggcaagctgaccctgaagttcatctgcaccaccggcaagctgcccgtgccctggcccaccctcgtgaccaccctgacctacggcgtgcagtgcttcagccgctaccccgaccacatgaagcagcacgacttcttcaagtccgccatgcccgaaggctacgtccaggagcgcaccatcttcttcaaggacgacggcaactacaagacccgcgccgaggtgaagttcgagggcgacaccctggtgaaccgcatcgagctgaagggcatcgacttcaaggaggacggcaacatcctggggcacaagctggagtacaactacaacagccacaacgtctatatcatggccgacaagcagaagaacggcatcaaggtgaacttcaagatccgccacaacatcgaggacggcagcgtgcagctcgccgaccactaccagcagaacacccccatcggcgacggccccgtgctgctgcccgacaaccactacctgagcacccagtccgccctgagcaaagaccccaacgagaagcgcgatcacatggtcctgctggagttcgtgaccgccgccgggatcactctcggcatggacgagctgtacaagtag

SEQ ID NO: 1155 - protein, 269 aa, Artificial sequence
  Synthetic
MCDGRGKSTRSTTDSGKVIPEWCVDGGGGSMVSKGEELFTGVVPILVELDGDVNGHKFSVSGEGEGDATYGKLTLKFICTTGKLPVPWPTLVTTLTYGVQCFSRYPDHMKQHDFFKSAMPEGYVQERTIFFKDDGNYKTRAEVKFEGDTLVNRIELKGIDFKEDGNILGHKLEYNYNSHNVYIMADKQKNGIKVNFKIRHNIEDGSVQLADHYQQNTPIGDGPVLLPDNHYLSTQSALSKDPNEKRDHMVLLEFVTAAGITLGMDELYK

SEQ ID NO: 1156 - DNA, 810 bp, Artificial sequence
  Synthetic
atgtgcgagcataggggacccgctgcgcggacaacaaccgagagtgggaaactcattacagattggtgtgtcgacggtggtggcggttcaatggtgagcaagggcgaggagctgttcaccggggtggtgcccatcctggtcgagctggacggcgacgtaaacggccacaagttcagcgtgtccggcgagggcgagggcgatgccacctacggcaagctgaccctgaagttcatctgcaccaccggcaagctgcccgtgccctggcccaccctcgtgaccaccctgacctacggcgtgcagtgcttcagccgctaccccgaccacatgaagcagcacgacttcttcaagtccgccatgcccgaaggctacgtccaggagcgcaccatcttcttcaaggacgacggcaactacaagacccgcgccgaggtgaagttcgagggcgacaccctggtgaaccgcatcgagctgaagggcatcgacttcaaggaggacggcaacatcctggggcacaagctggagtacaactacaacagccacaacgtctatatcatggccgacaagcagaagaacggcatcaaggtgaacttcaagatccgccacaacatcgaggacggcagcgtgcagctcgccgaccactaccagcagaacacccccatcggcgacggccccgtgctgctgcccgacaaccactacctgagcacccagtccgccctgagcaaagaccccaacgagaagcgcgatcacatggtcctgctggagttcgtgaccgccgccgggatcactctcggcatggacgagctgtacaagtag

SEQ ID NO: 1157 - protein, 269 aa, Artificial sequence
  Synthetic
MCEHRGPAARTTTESGKLITDWCVDGGGGSMVSKGEELFTGVVPILVELDGDVNGHKFSVSGEGEGDATYGKLTLKFICTTGKLPVPWPTLVTTLTYGVQCFSRYPDHMKQHDFFKSAMPEGYVQERTIFFKDDGNYKTRAEVKFEGDTLVNRIELKGIDFKEDGNILGHKLEYNYNSHNVYIMADKQKNGIKVNFKIRHNIEDGSVQLADHYQQNTPIGDGPVLLPDNHYLSTQSALSKDPNEKRDHMVLLEFVTAAGITLGMDELYK

SEQ ID NO: 1158 - DNA, 810 bp, Artificial sequence
  Synthetic
atgtgtggaaatcgcggtccgagcttgcgaaccactacggcttccgggaagctcatcaccgaatggtgcgtcgacggtggtggcggttcaatggtgagcaagggcgaggagctgttcaccggggtggtgcccatcctggtcgagctggacggcgacgtaaacggccacaagttcagcgtgtccggcgagggcgagggcgatgccacctacggcaagctgaccctgaagttcatctgcaccaccggcaagctgcccgtgccctggcccaccctcgtgaccaccctgacctacggcgtgcagtgcttcagccgctaccccgaccacatgaagcagcacgacttcttcaagtccgccatgcccgaaggctacgtccaggagcgcaccatcttcttcaaggacgacggcaactacaagacccgcgccgaggtgaagttcgagggcgacaccctggtgaaccgcatcgagctgaagggcatcgacttcaaggaggacggcaacatcctggggcacaagctggagtacaactacaacagccacaacgtctatatcatggccgacaagcagaagaacggcatcaaggtgaacttcaagatccgccacaacatcgaggacggcagcgtgcagctcgccgaccactaccagcagaacacccccatcggcgacggccccgtgctgctgcccgacaaccactacctgagcacccagtccgccctgagcaaagaccccaacgagaagcgcgatcacatggtcctgctggagttcgtgaccgccgccgggatcactctcggcatggacgagctgtacaagtag

SEQ ID NO: 1159 - protein, 269 aa, Artificial sequence
  Synthetic
MCGNRGPSLRTTTASGKLITEWCVDGGGGSMVSKGEELFTGVVPILVELDGDVNGHKFSVSGEGEGDATYGKLTLKFICTTGKLPVPWPTLVTTLTYGVQCFSRYPDHMKQHDFFKSAMPEGYVQERTIFFKDDGNYKTRAEVKFEGDTLVNRIELKGIDFKEDGNILGHKLEYNYNSHNVYIMADKQKNGIKVNFKIRHNIEDGSVQLADHYQQNTPIGDGPVLLPDNHYLSTQSALSKDPNEKRDHMVLLEFVTAAGITLGMDELYK

SEQ ID NO: 1160 - DNA, 810 bp, Artificial sequence
  Synthetic
atgtgcggtaaaaggggaccttctatcaggacaactaccagttcaggtcgcctggtcactgattggtgtgtcgacggtggtggcggttcaatggtgagcaagggcgaggagctgttcaccggggtggtgcccatcctggtcgagctggacggcgacgtaaacggccacaagttcagcgtgtccggcgagggcgagggcgatgccacctacggcaagctgaccctgaagttcatctgcaccaccggcaagctgcccgtgccctggcccaccctcgtgaccaccctgacctacggcgtgcagtgcttcagccgctaccccgaccacatgaagcagcacgacttcttcaagtccgccatgcccgaaggctacgtccaggagcgcaccatcttcttcaaggacgacggcaactacaagacccgcgccgaggtgaagttcgagggcgacaccctggtgaaccgcatcgagctgaagggcatcgacttcaaggaggacggcaacatcctggggcacaagctggagtacaactacaacagccacaacgtctatatcatggccgacaagcagaagaacggcatcaaggtgaacttcaagatccgccacaacatcgaggacggcagcgtgcagctcgccgaccactaccagcagaacacccccatcggcgacggccccgtgctgctgcccgacaaccactacctgagcacccagtccgccctgagcaaagaccccaacgagaagcgcgatcacatggtcctgctggagttcgtgaccgccgccgggatcactctcggcatggacgagctgtacaagtag

SEQ ID NO: 1161 - protein, 5 aa, Usutu virus
ETEAT

SEQ ID NO: 1162 - protein, 5 aa, Usutu virus
PTTGE

SEQ ID NO: 1163 - protein, 5 aa, Usutu virus
KSGVT

SEQ ID NO: 1164 - protein, 5 aa, Usutu virus
GKGSI

SEQ ID NO: 1165 - protein, 5 aa, Usutu virus
GSTSS

SEQ ID NO: 1166 - protein, 5 aa, Usutu virus
STSSD

SEQ ID NO: 1167 - protein, 5 aa, Usutu virus
QLGAS

SEQ ID NO: 1168 - protein, 5 aa, Usutu virus
QLGAS

SEQ ID NO: 1169 - protein, 5 aa, Usutu virus
GASQA

SEQ ID NO: 1170 - protein, 5 aa, Usutu virus
ASQAG

SEQ ID NO: 1171 - protein, 5 aa, Usutu virus
SQAGR

SEQ ID NO: 1172 - protein, 5 aa, Usutu virus
SPASS

SEQ ID NO: 1173 - protein, 5 aa, Usutu virus
SPASS

SEQ ID NO: 1174 - protein, 5 aa, Usutu virus
LTSGH

SEQ ID NO: 1175 - protein, 5 aa, Usutu virus
LKGTT

SEQ ID NO: 1176 - protein, 5 aa, Usutu virus
VASSE

SEQ ID NO: 1177 - protein, 5 aa, Usutu virus
ASSEA

SEQ ID NO: 1178 - protein, 5 aa, Usutu virus
GDKQI

SEQ ID NO: 1179 - protein, 5 aa, Usutu virus
AGSSI

SEQ ID NO: 1180 - skipped

SEQ ID NO: 1181 - protein, 5 aa, Usutu virus
STKAS

SEQ ID NO: 1182 - protein, 5 aa, Usutu virus
AKDKP

SEQ ID NO: 1183 - protein, 5 aa, Usutu virus
RAEDT

SEQ ID NO: 1184 - protein, 5 aa, Usutu virus
SGVTD

SEQ ID NO: 1185 - protein, 5 aa, Usutu virus
GSIDT

SEQ ID NO: 1186 - protein, 5 aa, Usutu virus
GSTSS

SEQ ID NO: 1187 - protein, 5 aa, Usutu virus
STSSD

SEQ ID NO: 1188 - protein, 5 aa, Usutu virus
SSQLG

SEQ ID NO: 1189 - protein, 5 aa, Usutu virus
LGASQ

SEQ ID NO: 1190 - protein, 5 aa, Usutu virus
TPNSP

SEQ ID NO: 1191 - protein, 5 aa, Usutu virus
WTSPA

SEQ ID NO: 1192 - protein, 5 aa, Usutu virus
SPASS

SEQ ID NO: 1193 - protein, 5 aa, Usutu virus
SPASS

SEQ ID NO: 1194 - protein, 5 aa, Usutu virus
ALGSQ

SEQ ID NO: 1195 - protein, 5 aa, Usutu virus
QEGAL

SEQ ID NO: 1196 - protein, 5 aa, Usutu virus
TGSDG

SEQ ID NO: 1197 - protein, 5 aa, Usutu virus
SSEAN

SEQ ID NO: 1198 - protein, 5 aa, Usutu virus
METEA

SEQ ID NO: 1199 - protein, 5 aa, Usutu virus
STVSN

SEQ ID NO: 1200 - protein, 5 aa, Usutu virus
KSGVT

SEQ ID NO: 1201 - protein, 5 aa, Usutu virus
STSSD

SEQ ID NO: 1202 - protein, 5 aa, Usutu virus
ASQAG

SEQ ID NO: 1203 - protein, 5 aa, Usutu virus
SPASS

SEQ ID NO: 1204 - protein, 5 aa, Usutu virus
QEGAL

SEQ ID NO: 1205 - protein, 5 aa, Usutu virus
QEGAL

SEQ ID NO: 1206 - protein, 5 aa, Usutu virus
SGSVK

SEQ ID NO: 1207 - protein, 5 aa, Usutu virus
LSDLT

SEQ ID NO: 1208 - protein, 5 aa, Usutu virus
SSEAN

SEQ ID NO: 1209 - protein, 5 aa, Usutu virus
GAQRL

SEQ ID NO: 1210 - protein, 5 aa, Usutu virus
ALGDT

SEQ ID NO: 1211 - DNA, 1572 bp, Artificial sequence
  Synthetic
atggagacagacacactcctgctatgggtactgctgctctgggttccaggttccactggtgacacgcgtttcaactgcctgggcatgtccaaccgcgacttcctggagggcgtgtccggcgccacctgggtggacgtggtgctggagggcgactcctgcatcaccatcatggccaaggacaagcccaccatcgacatcaagatgatggagaccgaggccaccaacctggccgaggtgcgctcctactgctacctggccaccgtgtccgacgtgtccaccgtgtccaactgccccaccaccggcgaggcccacaaccccaagcgcgccgaggacacctacgtgtgcaagtccggcgtgaccgaccgcggctggggcaacggctgcggcctgttcggcaagggctccatcgacacctgcgccaacttcacctgctccctgaaggccatgggccgcatgatccagcccgagaacgtgaagtacgaggtgggcatcttcatccacggctccacctcctccgacacccacggcaactactcctcccagctgggcgcctcccaggccggccgcttcaccatcacccccaactcccccgccatcaccgtgaagatgggcgactacggcgagatctccgtggagtgcgagccccgcaacggcctgaacaccgaggcctactacatcatgtccgtgggcaccaagcacttcctggtgcaccgcgagtggttcaacgacctggccctgccctggacctcccccgcctcctccaactggcgcaaccgcgagatcctgctggagttcgaggagccccacgccaccaagcagtccgtggtggccctgggctcccaggagggcgccctgcaccaggccctggccggcgccgtgcccgtgtccttctccggctccgtgaagctgacctccggccacctgaagtgccgcgtgaagatggagaagctgaccctgaagggcaccacctacggcatgtgcaccgagaagttctccttcgccaagaaccccgccgacaccggccacggcaccgtggtgctggagctgcagtacaccggctccgacggcccctgcaagatccccatctccatcgtggcctccctgtccgacctgacccccatcggccgcatggtgaccgccaacccctacgtggcctcctccgaggccaacgccaaggtgctggtggagatggagccccccttcggcgactcctacatcgtggtgggccgcggcgacaagcagatcaaccaccactggcacaaggccggctcctccatcggcaaggccttcatcaccaccatcaagggcgcccagcgcctggccgccctgggcgacaccgcctgggacttcggctccgtgggcggcatcttcaactccgtgggcaaggccgtgcaccaggtgttcggcggcgccttccgcaccctgttcggcggcatgtcctggatcacccagggcctgatgggcgccctgctgctgtggatgggcgtgaacgcccgcgaccgctccatcgccctggtgatgctggccaccggcggcgtgctgctgttcctggccaccaacgtgcacgcctag

SEQ ID NO: 1212 - protein, 523 aa, Artificial sequence
  Synthetic
METDTLLLWVLLLWVPGSTGDTRFNCLGMSNRDFLEGVSGATWVDVVLEGDSCITIMAKDKPTIDIKMMETEATNLAEVRSYCYLATVSDVSTVSNCPTTGEAHNPKRAEDTYVCKSGVTDRGWGNGCGLFGKGSIDTCANFTCSLKAMGRMIQPENVKYEVGIFIHGSTSSDTHGNYSSQLGASQAGRFTITPNSPAITVKMGDYGEISVECEPRNGLNTEAYYIMSVGTKHFLVHREWFNDLALPWTSPASSNWRNREILLEFEEPHATKQSVVALGSQEGALHQALAGAVPVSFSGSVKLTSGHLKCRVKMEKLTLKGTTYGMCTEKFSFAKNPADTGHGTVVLELQYTGSDGPCKIPISIVASLSDLTPIGRMVTANPYVASSEANAKVLVEMEPPFGDSYIVVGRGDKQINHHWHKAGSSIGKAFITTIKGAQRLAALGDTAWDFGSVGGIFNSVGKAVHQVFGGAFRTLFGGMSWITQGLMGALLLWMGVNARDRSIALVMLATGGVLLFLATNVHA

SEQ ID NO: 1213 - DNA, 2298 bp, Artificial sequence
  Synthetic
atggagacagacacactcctgctatgggtactgctgctctgggttccaggttccactggtgacacgcgtttcaactgcctgggcatgtccaaccgcgacttcctggagggcgtgtccggcgccacctgggtggacgtggtgctggagggcgactcctgcatcaccatcatggccaaggacaagcccaccatcgacatcaagatgatggagaccgaggccaccaacctggccgaggtgcgctcctactgctacctggccaccgtgtccgacgtgtccaccgtgtccaactgccccaccaccggcgaggcccacaaccccaagcgcgccgaggacacctacgtgtgcaagtccggcgtgaccgaccgcggctggggcaacggctgcggcctgttcggcaagggctccatcgacacctgcgccaacttcacctgctccctgaaggccatgggccgcatgatccagcccgagaacgtgaagtacgaggtgggcatcttcatccacggctccacctcctccgacacccacggcaactactcctcccagctgggcgcctcccaggccggccgcttcaccatcacccccaactcccccgccatcaccgtgaagatgggcgactacggcgagatctccgtggagtgcgagccccgcaacggcctgaacaccgaggcctactacatcatgtccgtgggcaccaagcacttcctggtgcaccgcgagtggttcaacgacctggccctgccctggacctcccccgcctcctccaactggcgcaaccgcgagatcctgctggagttcgaggagccccacgccaccaagcagtccgtggtggccctgggctcccaggagggcgccctgcaccaggccctggccggcgccgtgcccgtgtccttctccggctccgtgaagctgacctccggccacctgaagtgccgcgtgaagatggagaagctgaccctgaagggcaccacctacggcatgtgcaccgagaagttctccttcgccaagaaccccgccgacaccggccacggcaccgtggtgctggagctgcagtacaccggctccgacggcccctgcaagatccccatctccatcgtggcctccctgtccgacctgacccccatcggccgcatggtgaccgccaacccctacgtggcctcctccgaggccaacgccaaggtgctggtggagatggagccccccttcggcgactcctacatcgtggtgggccgcggcgacaagcagatcaaccaccactggcacaaggccggctcctccatcggcaaggccttcatcaccaccatcaagggcgcccagcgcctggccgccctgggcgacaccgcctgggacttcggctccgtgggcggcatcttcaactccgtgggcaaggccgtgcaccaggtgttcggcggcgccttccgcaccctgttcggcggcatgtcctggatcacccagggcctgatgggcgccctgctgctgtggatgggcgtgaacgcccgcgaccgctccatcgccctggtgatgctggccaccggcggcgtgctgctgttcctggccaccaacgtgcacgccgactacaaggacgacgacgacaaggtcgacgagcccaaatcttgtgacaaaactcacacatgcccaccgtgcccagcacctgaactcctggggggaccgtcagtcttcctcttccccccaaaacccaaggacaccctcatgatctcccggacccctgaggtcacatgcgtggtggtggacgtgagccacgaagaccctgaggtcaagttcaactggtacgtggacggcgtggaggtgcataatgccaagacaaagccgcgggaggagcagtacaacagcacgtaccgtgtggtcagcgtcctcaccgtcctgcaccaggactggctgaatggcaaggagtacaagtgcaaggtctccaacaaagccctcccagcccccatcgagaaaaccatctccaaagccaaagggcagccccgagaaccacaggtgtacaccctgcccccatcccgggaggagatgaccaagaaccaggtcagcctgacctgcctggtcaaaggcttctatcccagcgacatcgccgtggagtgggagagcaatgggcagccggagaacaactacaagaccacgcctcccgtgctggactccgacggctccttcttcctctatagcaagctcaccgtggacaagagcaggtggcagcaggggaacgtcttctcatgctccgtgatgcatgaggctctgcacaaccactacacgcagaagagcctctccctgtctccgggtaaatga

SEQ ID NO: 1214 - protein, 765 aa, Artificial sequence
  Synthetic
METDTLLLWVLLLWVPGSTGDTRFNCLGMSNRDFLEGVSGATWVDVVLEGDSCITIMAKDKPTIDIKMMETEATNLAEVRSYCYLATVSDVSTVSNCPTTGEAHNPKRAEDTYVCKSGVTDRGWGNGCGLFGKGSIDTCANFTCSLKAMGRMIQPENVKYEVGIFIHGSTSSDTHGNYSSQLGASQAGRFTITPNSPAITVKMGDYGEISVECEPRNGLNTEAYYIMSVGTKHFLVHREWFNDLALPWTSPASSNWRNREILLEFEEPHATKQSVVALGSQEGALHQALAGAVPVSFSGSVKLTSGHLKCRVKMEKLTLKGTTYGMCTEKFSFAKNPADTGHGTVVLELQYTGSDGPCKIPISIVASLSDLTPIGRMVTANPYVASSEANAKVLVEMEPPFGDSYIVVGRGDKQINHHWHKAGSSIGKAFITTIKGAQRLAALGDTAWDFGSVGGIFNSVGKAVHQVFGGAFRTLFGGMSWITQGLMGALLLWMGVNARDRSIALVMLATGGVLLFLATNVHADYKDDDDKVDEPKSCDKTHTCPPCPAPELLGGPSVFLFPPKPKDTLMISRTPEVTCVVVDVSHEDPEVKFNWYVDGVEVHNAKTKPREEQYNSTYRVVSVLTVLHQDWLNGKEYKCKVSNKALPAPIEKTISKAKGQPREPQVYTLPPSREEMTKNQVSLTCLVKGFYPSDIAVEWESNGQPENNYKTTPPVLDSDGSFFLYSKLTVDKSRWQQGNVFSCSVMHEALHNHYTQKSLSLSPGK

SEQ ID NO: 1215 - DNA, 1572 bp, Artificial sequence
  Synthetic
atggagacagacacactcctgctatgggtactgctgctctgggttccaggttccactggtgacacgcgtttcaactgcctgggcatgtccaaccgcgacttcctggagggcgtgtccggcgccacctgggtggacgtggtgctggagggcgactcctgcatcaccatcatggccaaggacaagcccaccatcgacatcaagatgatgctgtccgacgccaccaacctggccgaggtgcgctcctactgctacctggccaccgtgtccgacgtgtccaccgtgtccaactgccccaccaccggcgaggcccacaaccccaagcgcgccgaggacacctacgtgtgcaagtccggcgtgaccgaccgcggctggggcaacggctgcggcctgttcggcaagggctccatcgacacctgcgccaacttcacctgctccctgaaggccatgggccgcatgatccagcccgagaacgtgaagtacgaggtgggcatcttcatccacggctcctccacctccgagacccacggcaactactccaccaaggtgggcgcctcccaggccggccgcttcaccatcacccccaactcccccgccatcaccgtgaagatgggcgactacggcgagatctccgtggagtgcgagccccgcaacggcctgaacaccgaggcctactacatcatgtccgtgggcaccaagcacttcctggtgcaccgcgagtggttcaacgacctggccctgccctggacctcccccctgacctccaactggcgcaaccgcgagatcctgctggagttcgaggagccccacgccaccaagcagtccgtggtggccctgggctcccaggagggcgccctgcaccaggccctggccggcgccgtgcccgtgtccttcaccggcaccgagaagctgacctccggccacctgaagtgccgcgtgaagatggagaagctgaccctgaagggcaccacctacggcatgtgcaccgagaagttctccttcgccaagaaccccgccgacaccggccacggcaccgtggtgctggagctgcagtacaccggctccgacggcccctgcaagatccccatctccatcgtggcctccctgtccgacctgacccccatcggccgcatggtgaccgccaacccctacgtgatctccaccgacgccaacgccaaggtgctggtggagatggagccccccttcggcgactcctacatcgtggtgggccgcggcgacaagcagatcaaccaccactggcacaaggccggctcctccatcggcaaggccttcatcaccaccatcaagggcgcccagcgcctggccgccctgggcgacaccgcctgggacttcggctccgtgggcggcatcttcaactccgtgggcaaggccgtgcaccaggtgttcggcggcgccttccgcaccctgttcggcggcatgtcctggatcacccagggcctgatgggcgccctgctgctgtggatgggcgtgaacgcccgcgaccgctccatcgccctggtgatgctggccaccggcggcgtgctgctgttcctggccaccaacgtgcacgcctag

SEQ ID NO: 1216 - protein, 523 aa, Artificial sequence
  Synthetic
METDTLLLWVLLLWVPGSTGDTRFNCLGMSNRDFLEGVSGATWVDVVLEGDSCITIMAKDKPTIDIKMMLSDATNLAEVRSYCYLATVSDVSTVSNCPTTGEAHNPKRAEDTYVCKSGVTDRGWGNGCGLFGKGSIDTCANFTCSLKAMGRMIQPENVKYEVGIFIHGSSTSETHGNYSTKVGASQAGRFTITPNSPAITVKMGDYGEISVECEPRNGLNTEAYYIMSVGTKHFLVHREWFNDLALPWTSPLTSNWRNREILLEFEEPHATKQSVVALGSQEGALHQALAGAVPVSFTGTEKLTSGHLKCRVKMEKLTLKGTTYGMCTEKFSFAKNPADTGHGTVVLELQYTGSDGPCKIPISIVASLSDLTPIGRMVTANPYVISTDANAKVLVEMEPPFGDSYIVVGRGDKQINHHWHKAGSSIGKAFITTIKGAQRLAALGDTAWDFGSVGGIFNSVGKAVHQVFGGAFRTLFGGMSWITQGLMGALLLWMGVNARDRSIALVMLATGGVLLFLATNVHA

SEQ ID NO: 1217 - DNA, 2298 bp, Artificial sequence
  Synthetic
atggagacagacacactcctgctatgggtactgctgctctgggttccaggttccactggtgacacgcgtttcaactgcctgggcatgtccaaccgcgacttcctggagggcgtgtccggcgccacctgggtggacgtggtgctggagggcgactcctgcatcaccatcatggccaaggacaagcccaccatcgacatcaagatgatgctgtccgacgccaccaacctggccgaggtgcgctcctactgctacctggccaccgtgtccgacgtgtccaccgtgtccaactgccccaccaccggcgaggcccacaaccccaagcgcgccgaggacacctacgtgtgcaagtccggcgtgaccgaccgcggctggggcaacggctgcggcctgttcggcaagggctccatcgacacctgcgccaacttcacctgctccctgaaggccatgggccgcatgatccagcccgagaacgtgaagtacgaggtgggcatcttcatccacggctcctccacctccgagacccacggcaactactccaccaaggtgggcgcctcccaggccggccgcttcaccatcacccccaactcccccgccatcaccgtgaagatgggcgactacggcgagatctccgtggagtgcgagccccgcaacggcctgaacaccgaggcctactacatcatgtccgtgggcaccaagcacttcctggtgcaccgcgagtggttcaacgacctggccctgccctggacctcccccctgacctccaactggcgcaaccgcgagatcctgctggagttcgaggagccccacgccaccaagcagtccgtggtggccctgggctcccaggagggcgccctgcaccaggccctggccggcgccgtgcccgtgtccttcaccggcaccgagaagctgacctccggccacctgaagtgccgcgtgaagatggagaagctgaccctgaagggcaccacctacggcatgtgcaccgagaagttctccttcgccaagaaccccgccgacaccggccacggcaccgtggtgctggagctgcagtacaccggctccgacggcccctgcaagatccccatctccatcgtggcctccctgtccgacctgacccccatcggccgcatggtgaccgccaacccctacgtgatctccaccgacgccaacgccaaggtgctggtggagatggagccccccttcggcgactcctacatcgtggtgggccgcggcgacaagcagatcaaccaccactggcacaaggccggctcctccatcggcaaggccttcatcaccaccatcaagggcgcccagcgcctggccgccctgggcgacaccgcctgggacttcggctccgtgggcggcatcttcaactccgtgggcaaggccgtgcaccaggtgttcggcggcgccttccgcaccctgttcggcggcatgtcctggatcacccagggcctgatgggcgccctgctgctgtggatgggcgtgaacgcccgcgaccgctccatcgccctggtgatgctggccaccggcggcgtgctgctgttcctggccaccaacgtgcacgccgactacaaggacgacgacgacaaggtcgacgagcccaaatcttgtgacaaaactcacacatgcccaccgtgcccagcacctgaactcctggggggaccgtcagtcttcctcttccccccaaaacccaaggacaccctcatgatctcccggacccctgaggtcacatgcgtggtggtggacgtgagccacgaagaccctgaggtcaagttcaactggtacgtggacggcgtggaggtgcataatgccaagacaaagccgcgggaggagcagtacaacagcacgtaccgtgtggtcagcgtcctcaccgtcctgcaccaggactggctgaatggcaaggagtacaagtgcaaggtctccaacaaagccctcccagcccccatcgagaaaaccatctccaaagccaaagggcagccccgagaaccacaggtgtacaccctgcccccatcccgggaggagatgaccaagaaccaggtcagcctgacctgcctggtcaaaggcttctatcccagcgacatcgccgtggagtgggagagcaatgggcagccggagaacaactacaagaccacgcctcccgtgctggactccgacggctccttcttcctctatagcaagctcaccgtggacaagagcaggtggcagcaggggaacgtcttctcatgctccgtgatgcatgaggctctgcacaaccactacacgcagaagagcctctccctgtctccgggtaaatga

SEQ ID NO: 1218 - protein, 765 aa, Artificial sequence
  Synthetic
METDTLLLWVLLLWVPGSTGDTRFNCLGMSNRDFLEGVSGATWVDVVLEGDSCITIMAKDKPTIDIKMMLSDATNLAEVRSYCYLATVSDVSTVSNCPTTGEAHNPKRAEDTYVCKSGVTDRGWGNGCGLFGKGSIDTCANFTCSLKAMGRMIQPENVKYEVGIFIHGSSTSETHGNYSTKVGASQAGRFTITPNSPAITVKMGDYGEISVECEPRNGLNTEAYYIMSVGTKHFLVHREWFNDLALPWTSPLTSNWRNREILLEFEEPHATKQSVVALGSQEGALHQALAGAVPVSFTGTEKLTSGHLKCRVKMEKLTLKGTTYGMCTEKFSFAKNPADTGHGTVVLELQYTGSDGPCKIPISIVASLSDLTPIGRMVTANPYVISTDANAKVLVEMEPPFGDSYIVVGRGDKQINHHWHKAGSSIGKAFITTIKGAQRLAALGDTAWDFGSVGGIFNSVGKAVHQVFGGAFRTLFGGMSWITQGLMGALLLWMGVNARDRSIALVMLATGGVLLFLATNVHADYKDDDDKVDEPKSCDKTHTCPPCPAPELLGGPSVFLFPPKPKDTLMISRTPEVTCVVVDVSHEDPEVKFNWYVDGVEVHNAKTKPREEQYNSTYRVVSVLTVLHQDWLNGKEYKCKVSNKALPAPIEKTISKAKGQPREPQVYTLPPSREEMTKNQVSLTCLVKGFYPSDIAVEWESNGQPENNYKTTPPVLDSDGSFFLYSKLTVDKSRWQQGNVFSCSVMHEALHNHYTQKSLSLSPGK

SEQ ID NO: 1219 - protein, 5 aa, Usutu virus
PTTGE

SEQ ID NO: 1220 - protein, 5 aa, Usutu virus
NPKRA

SEQ ID NO: 1221 - protein, 5 aa, Usutu virus
SSDTH

SEQ ID NO: 1222 - protein, 5 aa, Usutu virus
HGNYS

SEQ ID NO: 1223 - protein, 5 aa, Usutu virus
PNSPA

SEQ ID NO: 1224 - protein, 5 aa, Usutu virus
PRNGL

SEQ ID NO: 1225 - protein, 5 aa, Usutu virus
TSPAS

SEQ ID NO: 1226 - protein, 5 aa, Usutu virus
PASSN

SEQ ID NO: 1227 - protein, 5 aa, Usutu virus
PHATK

SEQ ID NO: 1228 - protein, 5 aa, Usutu virus
FAKNP

SEQ ID NO: 1229 - protein, 5 aa, Usutu virus
TGSDG

SEQ ID NO: 1230 - protein, 5 aa, Usutu virus
ASSEA

SEQ ID NO: 1231 - protein, 5 aa, Usutu virus
MPETP

SEQ ID NO: 1232 - protein, 5 aa, Usutu virus
PKGMY

SEQ ID NO: 1233 - protein, 5 aa, Usutu virus
PETKE

SEQ ID NO: 1234 - protein, 5 aa, Usutu virus
HNTTD

SEQ ID NO: 1235 - protein, 5 aa, Usutu virus
PKSNH

SEQ ID NO: 1236 - protein, 5 aa, Usutu virus
QGPWD

SEQ ID NO: 1237 - protein, 5 aa, Usutu virus
SIRTT

SEQ ID NO: 1238 - protein, 5 aa, Usutu virus
RTTTS

SEQ ID NO: 1239 - protein, 5 aa, Artifical sequence
STTAS

SEQ ID NO: 1240 - protein, 15 aa, Artifical sequence
GPSLRSTTASGRVIE

SEQ ID NO: 1241 - protein, 15 aa, Artifical sequence
GPSLRMTMVSGRVIE

SEQ ID NO: 1242 - protein, 86 aa, Artifical sequence
SAVGEHEKVINNQKEKEDFHSYLPIIDPILSKSKSYKNEVTPSSTTASVARKRKSDGMEDANVRVAITEHTEVREIKRIHFSPSEP

SEQ ID NO: 1243 - protein, 86 aa, Artifical sequence
SAVGEHEKVINNQKEKEDFHSYLPIIDPILSKSKSYKNEVTPSMTMVSVARKRKSDGMEDANVRVAITEHTEVREIKRIHFSPSEP

SEQ ID NO: 1244 - protein, 86 aa, Artifical sequence
SAVGEHEKVINNQKEKEDFHSYLPIIDPILSKSKSYKNEVTPSSTTDSVARKRKSDGMEDANVRVAITEHTEVREIKRIHFSPSEP

SEQ ID NO: 1245 - protein, 22 aa, Artificial sequence
  Synthetic
  MISC_FEATURE (2)..(3): Xaa=any amino acid
  MISC_FEATURE (6)..(8): Xaa=any amino acid
  MISC_FEATURE (10)..(10): Xaa=any amino acid
  MISC_FEATURE (13)..(14): Xaa=any amino acid
  MISC_FEATURE (16)..(20): Xaa=any amino acid
CXXRGXXXRXTTXXGXXXXXWC

SEQ ID NO: 1246 - protein, 5 aa, Dengue virus
QGKRT

SEQ ID NO: 1247 - protein, 5 aa, West Nile virus
DKPTI

SEQ ID NO: 1248 - protein, 5 aa, West Nile virus
TTVES

SEQ ID NO: 1249 - protein, 5 aa, West Nile virus
EPRSG

SEQ ID NO: 1250 - protein, 5 aa, West Nile virus
GSQEG

SEQ ID NO: 1251 - protein, 5 aa, West Nile virus
KGTTY

SEQ ID NO: 1252 - protein, 5 aa, West Nile virus
PADTG

SEQ ID NO: 1253 - protein, 5 aa, West Nile virus
TGTDG

SEQ ID NO: 1254 - protein, 5 aa, West Nile virus
RGEQQ

SEQ ID NO: 1255 - protein, 5 aa, Zika virus
MSGGT

SEQ ID NO: 1256 - protein, 5 aa, Zika virus
DKPTV
